United States Patent Application Publication US 2012/0270216 A1 - sequence listing, part 3

SEQ ID NO: 53 - DNA, 4685848 bp, Salmonella enteritidis (residues 3,123,901-4,685,848 of 4,685,848)
atcgtcaacgcgccgccgctatcggcgtactctttcaggaagcggaaaaccagattttccacagcaatgtcgcgcaagaggtcgcttttgggctgaaactacaacgcttatcggcagaggaaatttcacggcgcacgcaggccgcgctgcggttatgccagctaacggacgtcgccgaggcgcacccgcttgatctgcacgccgcaccgcgccggatggtggcggtcgccagtctggaggcgatggcgccgcctgtgttattgctggatgaacccagccgggattttgacgcccactggctaaccgtatttgaacactggctggcgacatgccgggcacggggaaccagcgtcgtggcgattagccatgacgctgcgtttacccggcgtcatttttcacgggtggtacggctggaaaacggcaggttgtcaaagggagaataaaaaacgggtcgccgaagcgacccgttttatgccgtattaaggattacagcagtgctttcgctttggcgatcacgttgtccaccgtgaagccaaactcttcaaacaacagctctgccggggcggattcaccgaaggtggtcatcccgacaatagcgccgttcaggccgacgtatttgaaccagtagtcagcgatacccgcttcaatcgctacacgcgcagagacgtccttcggcagcacggattcacggtaagccgcatcctgcttgtcgaatgcgtcggtagacggcatggaaaccacgcgcgccttcacgccttcggcagttagtttttcgtaagcggcaaccgccagctcaacctctgaaccggtcgcaatgaagataatctgcggctggcccgcacaatctttcagtacgtaaccaccgcgggcgatattcgccagttgctcttcagtacgttcctgctgcgccaggttctgacgggagaggatcagcgcggttgggccatcctgacgctctacgccatatttccacgccaccgcggattccacctggtcgcacggacgccatgtggacatgttcggcgttacgcgcaggcttgccacctgctcgaccggctggtgcgtcgggccatcttcgcccagaccgatggagtcgtgggtatagaccatcacctgacgctgtttcatcaacgctgccatacgcactgcgttacgggcatattcgacgaacatcaggaaggtggaggtgtacggcaggaaaccgccgtgcagggcgataccgttggcgatagcggtcataccgaattcgcgcacaccgtaatgaatgtagttacctgcggcatcttcgttaatcgctttcgaaccggaccacagggtcaggttagaaggtgccaggtcagcggagccgccgaggaattccggcaacagcggaccgaaggcttcgatggcattctgggacgctttacggctggcgattttggatggattcgcctgcagtttagcgatgaactcattcgctttcgcatcgaagtcagccggcatgtcgcctttcatacgacgagtgaattcagcagcttcctgcgggaaggctttctcataagccgcgaatttctcattccatgcggattctttcgcctggccggcttctttcgcatcccactgggcgtagatttcagacgggatttcgaacggcgcgtatttccagcccaactgttcgcgggtcagcgcgatttccgcgtcgcccagcggcgcgccgtgggaatcgtgggtaccctgtttgttcggcgaaccgaaaccgatgatggttttgcacatcagcagggacggtttgtcagtcacggcgcgagcttcttccgtggcgcgtttaatggcgtcggcatcgtgaccgtcaatgccacggataacgtgccagccgtaggcttcaaaacgtttcgcggtgtcatcggtgaaccagccttcaacatgaccatcgatagagataccgttgtcatcatagaacgcgatcagtttgcccagtttcagagtaccagccagagagcacacttcgtgagaaatgccttccatcatgcagccgtcgcccataaagacgtaggtgaagtggtcaacgatatcgtggccaggacgattaaactgcgccgccagagttttctcggcaatcgccatcccgacggcgttggcaataccctgacccagcgggccagtagtggtttcaacgccagcggtgtagcccacttccgggtgaccaggggtttttgaatgtagctgacggaaattctgcagctcggacatcggcaggtcataaccggtgaggtgcagcaggctgtaaatcagcattgagccgtggccattggacagcacgaagcggtcgcggtcggcccaggacgggttggtcgggttgtggttcaggaaatcacgccacaggacttcggcaatgtcagccatacccatcggggcacccgggtgaccggatttggctttctgtactgcgtccatgctcagcgcacgaatagcattggcaagctctttacgtgaggacattttgactccagatcggatgttgaaaggccatgcccgtaacgacttgacgacagcgcgttttgggctacgccggaaaatttgccaacaatttaccccaagccgcgcgtcatgtacatggaacatccttttaccgcttcagaaatctctggatcgtgctcgtatgttgcgcaattagctaacttgcctgccatgcttttctttatacttaacccaggcgctaattcatctgcaacgagcgcatttcaaaataatattaattcgtatggaagagaaaaatgaaaattcgcgctttactgcttgctttgggcatggcgacggtgctgaccggttgccagaatatggactctaatggactgctttcttcgggcgctgaagcttttcaggcctatacgttaagcgatgcgcaggtaaaagcgttgagcgatcaatcctgtcaagagctcgacagcaaagcgaaaatcgcgccggcgagcagcgaatacgctaaacgactggcaaaaattgccgctgcgctgggggataacattaacggccagccggtgaactataaggtttacgagacgaaagacgtcaacgcgtttgccatggcgaacggttgtattcgcgtctacagcggactgatggatatgatgaccgacaacgaagttgaagccgtgatcggccatgaaatgggccatgtcgcgctgggtcatgtaaagaaagggatgcaggtcgcgctgggcactaacgccgtgcgcgtcgcggcggcatcggcaggaggcgttgtcggcagcctgtcgcaatcacagcttggcgatcttggcgaaaaactggtgaactcgcagttctcccagcgtcaggagtccgaagcggatgattattcttacgatctgttgcgcaaacgcggtatcagtccggcaggacttgccaccagctttgagaaactggcaaaactggaagcgggtcgtcaaagctcgatgttcgacgatcacccggcgtccgccgcacgcgcacagcatgtgcgcgatcgtatgagcgcggacgggatcaaataatccccgaacagtgccggatggcggcgtggacgccttatccggcctacaagcatcaatcagctgtaggccggataagcgcagcgccatccggcaaaacaacttactcgcctttcttcgccgcctggatatagagcatttctaatgccagcgtcgcggccgccagagcggtgatctccgactgatcgtaagccggcgcgacttccactacatccataccgacaatgttcagatctttcagaccgcgtaccagtttaatggcgcgatcggaggtcaaaccgccgatcaccggcgtaccggtgccaggcgcaaacgccgggtccagacagtcgatatcaaaggtcagatagaccggcatatcgccgacgatctgtttcacctgagcgagaatatcatccacgccgcgatcgttgacctggcaggcatccagcacggtaaagccattgtctttgtcaaactcagtacgaataccgatctgtaccgaatgatgcggatcgatcaggccttctttcggcgcggtgtagaacatcgtgccgtgatcgaattcgcagccgttagcgtaggtatcggtatgcgcatcaaaatgtaccagcgccattttgccaaaatgtttcgcgtgggcgcgcagcagcggcagcgtgacgaagtggtcgccgccgaaagagagcatacgcttgcctgcagacagcagtttttcagcgtgcgcctgtaatttttcactcatctcacgggcatcgccaaacgcatacaccaaatcgccgcagtccacgacgttcaggcgctcgcgcatgtcaaaactccacgggaaacggtgatgttcccaggcgaggttggtcgacacctgacggatcgccgccgggccatgacggccgccagcgcgaccggacgttgccatatcaaacggtacgccagtgatcacccagtcggcatcgctgtcatacggctggaagttcattggcagacgtaaaaaaccaaacgcattagaaaccagtgagttatcgtactgatgacctaaggtgctcatggcaaaaacctcttcttagtcaatataaaaaaaccctcccgcgtcgttaggcccgacgaggaagggtttgaatttgtttacggctcaaagtttactctgacagaccgcattattgaagtcagtttagccaggtacagtagacaacgcccgaaaaaaatatatatccagcgcaaatcagtaggctcatacgtccatcgcggtcagttaagaggccttagggagttgccgctgtaaaaactcaagcactaatgcgtaaaacagcggtgttttccccggcgtctggaaaatggcgtgaccgctaccgggaatgagggtcatctccgcctgaggcagcagccggtacagctcggtaacttcttcaacggtgaaaaattcatcccggtcgccgtccagtaatagcacaggaatgtggatttttttcacctcttcttccgtcagcgatgtgggcgttgtccacattggccagacaccttcgagaaacgtgcgccagtagtctttttgctctggatgatgcatgttctgataaaatttaaccatcccgggcgcatccgaagccattttatccagatctcgatccgtcaattgcccctaaggcattcctttaccataaaaaatttccatcccctgcatgtaatgggtcgtagcaaagcgatgcgttgcgccgccgacgatagcagcgcgcgctagatccgggtatcggctggttaacttcagaacgaccatgccgccatcgctgtaacccatcaccagcggtttttccagcttcagcgctttaacaaaagccgccatatcttccgtcatcagatcatagctaaacgttccttgcgggttattggttaatccatgtccacgactgtccggcatgatgacgcgaaaatatcgagatgcctctttcgctaatccctgccaacttttcgccgtcagaccaccaccgtgaatcaacagcagcggaggcccctcgccctcttcaacgtaatgaattttgataccattcgcttccacaaatttatctttgtccatcgttgttgctgaagcatttattaaaaatataatattgataataaaaataaatgctaatttaaaaatatgattcataacacctcgccaatcactttccgtgtaaaagaccatattattcagattgaacaaaaataacatcaaaatcgatttgtatcattttcacttatttaccggggagaccccgcatcctctttttacagaacgtaaaaagcctttccgcgattagcctcaacgcgaaaaggctctgaagtcagaaaagtgccaccttattcattctggctgtaattcaggatgacttgaaggtctcttcctgaattgcatttggcgctttctttattccttcgtctgacagggcaagcttgactcgctaaatgccgtggccggaattttcacaatcgcttttttaaccggcgcaggtttaccacgcgtacaaagcggacggtggatctggttgggataaaaaagcgcgaaatcgccaggatttaatgtaacgaactgctcattagcgacacattcaggaaagatgatgtcatcaggaagatgctcaagctcctttatcctggtatcaattttgttggaatagccaatctcctcataaccgcttagtaaaatctgaacatcgatatattttttatgaagttcagctttgcggtttaacgaagagtgtgtttctccttcgcttatcataagaaatgactccgggaaagaaagttcatatctaccagcaggctgatcttcagctatcttcaccgcttcgatgataagttttttaataatgtggttaacgtaaggtaataaagtaagctgctctatatttccatatagcatactatagttatcctaaataatggtcgtgattataattatcagccaatcaggtactggtaaataccttcagccacaggaataccttcttttaaacatttttctttataggcgatttgcggatcgtttggcgccagcactttatcaacaccgggcatcggttttacagcccttagctcattgaccattgtgctcattattgaggaaaacagcggattgcccaacatctgcggatcaataacgataaccagactcgctaacttgcgcatcttgtcatagtcgccatacatccgaacaatatggttgctaaagtttgcccccatcaggacgcccgtgagcgcatcaatcgccagggcaataccagaacctttgtgtccgccaaagggcagcagattttcaattttatgcggatcggtagtgatatgtccctctttatccagcgccagaccatgacctattggtttcccggtttctttggcgtgcagaattttaccaaacgcaatggcgctggtcgccatatcgacgatcatcggatggctgtctttaacggggaagccgaaggcgattgggttagtccccagaaagcgctccgcgccgccatacggcgcaacgcaggtatccgtttgcgtcatggcgatagccaccattccctggcttgtcgcctgctcaatgaaccacgagagcgcgccgcaatgggacgtatttttgacgctgacgaagcccagccccgtctctctcgccagactaatagcgtggtctgtcgcctttatcagcgcgcagtgccccattccatcatcagagtccagaatagcgacagaaggcgaaatctgttcgatgctgaatgttgcttttggattgagcccgcctgcgttcaggcgggtacaatagtgctctacgcgaataacgccgtgggagtgaacgccggtaatatcggcatgaaccaaaacgtcggctacctgctgcgccgtttgcgcgtcaaggcccgcctgggtgagtttattaaacgccagcgctttcaattcattttctttgactaatattgttgacataactatcccgctattaaaatttgataacgcctttaaccaattttttgttttctaccacgttcttctggtactggttgccgaacgtatagaaatcgaattcctggtttttcatcattgtttcgctaatagcgccctgagccattagctcaatgacacattcgaagtcttcccgcgtcgcgttacgactgctcaatagcgtggtctcttttttatggaaggtcggatcgtcaatgacgagctcgccgatatatagcccgatgaagacgatttttccgccgtgaagaatcagatcaacagcgcggctcatggaggatttattgccggtggcatcaagcacaatgccggctaattcaccggagaaacaggctttcagcacatcaatatagtcgtctgacgacggatcgagcgttgcaacgcctaccttttcggcgaccagacgacggcgttcggcgtcaatatcagctaccgcgacgcgagcgcctttggcttttgctatcgcggcggcggccagcccaatcggcccggcgccgaccaccacaatgttttgctgcggcttcacgtcagcgcggcgtactgcgtgggcgctgatggcgaaacactcaaccagcgcgcccgcgctgtcggtgaggttatccgacagttcaaccagattttgttcacgaacggccagatattcgctaaagccgccgtcctggtgaacgccatacagcgagacgttctcacagcagttggtttttccttcccggcaggctgcgcaagcgccgcaaggaatacagggaataacgctatagcgttggccgaccttcgccgtgctgcacgatttacccaatatttccgccacgccgcaaatttcatgacccagcacgcgcggataggcaaaaaagggctggcgaccggcaaacgcatggatatcggtgccgcaaataccaaccgctttaatttttaacagtacttcatcgtcttttaaatgaggaatatctctttcaatgtattcgatatttcccggattattacagataagcgttttcatacttaaccctttgaagataaacggtgaatggtggccgtgacgccatgtaactcaatatggttaaaggcctgctgaatgtcgtttaaaaagtctgcgttgtcgccggccagcgttccaaagatgctatttatctgcagcaaagacagcgcttgttcccatcgcgtgtttttatttttaatagccgcattgaaggtatcattgagcgggtcggccacactctgcccctgagagagtgtattaatgacgtaatggagccagcccgcaatcagcgtcgctaacgccctgcccttaacgccgcgcgcctgaagcgtcagataaggatcgacggcccgctgaggcagcttctgagaaccgtccatcgcaatctgtccggtcttatgtttaatgttcgggttgctgaatcgctcaatgagcaactgcgcatattgatgtacatctaccgccaaattcgggcgcagcgattttgcctgctcttccgtcattaaatgatgtacggcggttttaaaagcgtcgtcttccatgcactgatagataaactcatatccagccaggctgccgttataggcgagaaacgaatggctgccattcagcatacgaagtttcatttcttcatagggaagcacgtccgagacgaacatcgcccctgctttatcccagtcaggacgaccggcaacgaaattatcttcgataacccactgacggaaatcctcgcatacgatgccgcagggatcggcaaaaccgatctggtctttaatcatgtcaaattgctctggcgtcattgccggcacgatgcgatcgaccatggtgccaggaaaggtgacatgcttcgctatccaggccgccagttgcggatcgagattatcggcaaacgtaacgatcgccgttttggtcaaatgaccgttttccggaatgttatcgcacgacagtacactaaacgggggaagcccttgctggcggcgtatccgtagcgcttcgacgatcagtccgagtgctgagcggggatgttcaggatcggcaagatcgtgtttgatgagcggatggctgagatcgagcgttctggaccgtggatcggtgcagtaacctttttccgttatcgtcaacgaaacaatttttacctgcggctcagtcagcttctcgatcgccgcctgaatacctgacttcggcgtatgcaacgcgccggtgatggtacgaaccaggcgactattgatggcgctggctgacgtttccaccactgaaaacagcccctgttgcgcatttagcgcatccaccagctccgcatcgccgaacagattcagttcaaaaatcccccagcggttgccggttatctcattcgtgagatcgttataaaccgcctgatgaccacggtgaaaggcgccaaatccaatatgtacgatgttggcttccattccctgacgtgaataagtcgttttgaattggtgccttgcggcgtctaactggcgagctatggtgtccatgaatttttcccactcctgttttgtttaccaattctgcttaaacagcataccaaaatccgtgaatatgatcacactcacggcaccgggttcttcaccctggtatgctgactaatagccaatgaataaaaataatttatttatcaattggttataaaatacgcttgtcaggataaattttacgattcacaaaagcgtgattttgattagaaaaatcggccacgaattggcataccacccacacaactgcaatcattaaacaccatgaaaaacaataccttattgaatagcacgcccgctgcgagcgtatatgtcacgcatgattggttcaataattacccgaaatacagcaaaccaaatctgataatttgtctagtgaattaatgaactcaatttattatcagcatcaacgttaacctaagaacatcagttacggttttgatcatccgggtcgctgctaaagcgatgaggagtgagccgcctttagacgtaattggcaaattaatccattgattgaacacaggaaaaaattgatgaagacgcagattaggcacgttgaaacaaagctttcaaagcccctctggccaaggtcttagttgacgcaaaacatggcataatagccatttcgaactggtaaccacgacgattacgctggaagacggttcaactggcaccggatattcctataccggcggaaagggagggtatgcaattaaagcgatgttcgaccacgatcttgccccggtactgtcagggaaagaggcgctgcgattgacgatatctatgactttatggaatagcatattcactatgtgggtcgcggaggcatcgcatcgtttgcgatggatatcgctctttgggatttgaaaggcaaacgtgaaaaactgccgctgtggaaaatggctggctgaaggcggcgcgtctgtcgacgaatggcggtcgtttggtatgctcgctcggtatgcaggaattacacgtcagactggtttccgcattcgagactggctgactggaagttcacagcttcccgatcgatcaatataccaaacatccgctggtggacgacaattatcgcgccgtggcaccggacacctacggcattggcgtagagtttgactgggataagctgagcgtttacgaagcctgattccctctctccgggcttgtttttggcggcaggcccggttaatcgctgacaaaaatgtcatccgcctgaaaatagccgtcaggtggcgaagaaaaaatcatcaaaatcttccagcgaatcatcctgttggaagatttttaccagctcatttttactgttttcaagatgggtccacgaggcctgtctggcctgctcagcatcgcgtttttgcaatgcaaggaagatactacggtgatcttccacccatttcattcttaactctttcttatgtaaatacttatagtttaactgcttccagcgcggattttcggtcctgacagcccgccacagctcggcagattgtttcattaatacacgattttgcgtggattccgcgatgatattgtggaactgacgatccagttcttcaaatttgtcgctgtcgccgccaatctgcttttcctgctgctcaataatacgtttaagctgcttaagctcattaaatcttatttgcgtagcggcaaaaccggtgatgttactttcgataacctgccgggcctgtagcaattcaaaggggccaatgtctgagtaaggcaagagcgctttttgattgattttttccagactatcaataaagtaagtgcctgcgccttgcttaacctctaccacccccttcagctcaagcataataatcgcctcacgaatcgtcgtgcggctggtttgaaaacgctcgctgagttctctctccgccggaagtcgctcgccagctttaaatacccctgaatagagtagttcttctatttgcagccctatatcaaaatagcgccgcttggttaaaatttgttccatgcacatacctatgtagacagcaattgctccacttgagggtagtgtaaacaaatcctaatgtttatggtaaacaatttccctgccagagagtggtcgtttctttcccgcaacctacggctatgcgcgtcacacagtccttccccaccagactcggcaggaaaggcgctaattcccataacgcatatttgacgtttgatgccgggtttatttgcggcagggcggcggcgcatacccgttgttgtccgccgggaaagcctgcgaggaacaaggcggtagcgtatttgttgctttaccctgcaatgcaaaagcggcaaagccgatgacgccgatgttgcgtacatcgccctgcgcggagtgggccgcataagcgtcagctacgtcggcgaactggaatgccgcctcagtgtgtttatctttgcgaaaccctttaatcgccagtgaatcgccggcgttaacaatatagccatgatgattcagcgagcctgcttttccgttcaacacgtccaggccatcaaccgttgcgacgatttcgtaattggtatcatgactgtaattacgaatatataactgatagttcatccctgatcttgcaggaatactatattgccattgtcccattgatgcgttgtagcgacgagtaattggaatcgaattaaaattagcgtcgcgcacagcatattcaagatcgctgatacgtatactataaactttatcgtaacctgacggatattgagtggagtaatttattatcaccatttcggcaggttctcgatcggcacgttctaccgaaacgctttgtaccgatgaatgcacgtcgccgccccaggcggtgccgacgtcggatgaagagccattattagattgcattccgctggaacaaccgcctaacagcaaaaacaagccaacaatgacggcattaaatttaaatttgctcatacttaaccccctttttaattattagggggattgtaggcccataaaattacatagagaagcggcaccgctgataattaagaatttataaaatataaaagggtcgatttaaataattaaatcgacccacaagcggaatactcttaattactcatcttcaagataagtataaccgtacagtcccgcttcaaattcctcaaggaactgctgctgcaacgcatcgtccagatccgtctgttttacctggtcgcggaaatgcgttaacagcgtttttggatccagttgcacatattgcagcatatccgcaacggtatcgccttcgtccgacagctcaacctcgacgctaccatccgggaagacaaacacgtcaaccgcttcagtatcgccaaacaggttgtgcatgttaccgaggatctcctgataggcgccgaccataaagaagccgagcatcggtggattctctggatcgtattccggcatcggcatcgtcgtggcgataccgtcgccatcgatatagtggtcaatagcgccatcggaatcacaggttatatccagcagcacggcacgacgttccggtacctgatctaacccttccagcggcagcaccggaaagagctgatcgattccccacgcgtccggcatcgactggaacagcgagaagttgacgtacattttgtccgccatccgctcttgcagttcgtcgataatcgggcgatgcgcacggttttgcgggtccagttgcttctgcacttcatggcacatgctgagataaagttgctccgcccaggcgcgctcctgcaaactaaacgcgccggaagagtagccgatatgaatatcgtgcagatccatttggctatcatgcagccactcacgcagcgagcggcgggtgccaggtttatgcatctcctgccaggtttcccacagattttgcagcgcgcgcggcgcatcttcagcaggggcagtcggatccgtgtattcgttacgctccacaccgataatgttagagaccagtaccgtatggtgcgcagtgacggcgcggccagactcggtaatcaccgtcggatgcggtaaaccatgctcttcgcaggcatcgccaatcgcccagatgatgttattggcatattcgttcaggccatagttcaccgaacagtcggactgcgagcgggtaccttcataatccacgcccagaccgccgcccacgtcgaagcactggatattaacgcccagcttatgcagctcaacatagaaacgcgcggactcgcgcacgccggtcgcgatatcgcgaatgttcgccatctgcgatcccaggtggaagtgcaacagttgcagactgtccagacgcccggcgtcacgcagggtctccaccagttgcagcacctgggtcgccgccaggccgaattttgatttttcgccgccggaggattgccacttaccggacccctgagaggccagacgcgcacgcacgcccaggcgaggaaccacattcaggcgctcggcctcttccagcacaatcgcgatttcagacatcttttcgatgaccagataaaccttatggcccatcttctcgccaatcagcgccagccgaatgtattcacggtctttataaccattacagacgatcacgctacgggtcatgccggcatgcgccagcaccgccatcaattccgcttttgaccccgcttccagccccaacggttcaccggaatggataagggactcgatcacgcggcgatgctgattgaccttaatcggataaacgaggaagtagtcgccgttataaccgtaagattcacgcgcacgcttaaacgccgcgttaattgaacgcaaacggtgttgcaggatctgcgggaagcagaacagcgccggcagacgctgaccttgcgcttcgcgcgctttcaccagtttggcaagatcgacacgcgcttccggtacgtcgggatcggggcatacgctaatatggcccagctcgttgacgtcgtagtagttattgccccaccaggcaatattgtaagtgcgcagcatcttgctggcttcctgggagctcattgcaacctcctgcatggagcgtagtacaccctgttcgcctgctgacgaaggcgaacccatagacatgtcgtcagacatagcgaacctcaatttttattagcaagtgtaaaacagttgactactatcgcaatccgaagacgcgataacaacccatagacaagcggattttccagcagatagcgctgatgctccgcctgcgcgaccggtttctttttcatatcattgtaaacacgtaaccgaactcacagataacggttcggcgaaaccacgagaaaactcttgcgttaacaagagcgcccttgttcagtcttcagcgccattgccggctctggaatcctgagaagcgccgagatgggtataacatcggcaggtatgcaaagcagagatgcagattgcgggggacatgcgcgcaccagaacgatgcgacagattcagcagaatacaacggttcattatctcgtatcacctccacggccgcctcgtaagacgaacccacaagccaaagcaacgttttaacccggctggaagtggcgacacgaagaaaacgtcgtgtgcttttgtatgagccgcgcgtcgcgttttatacccagaacgcagaaaaaaagcaaagcataaatgcgcataatgtcagcattatcagaaacgtttatcgcctgattttgaccgacattgcgacggccttcaaaaaaagctggaaattgggcgaagaagtgacctaaaatagccgtccagatgttaatccatccatactgattaacactcagactgccagtgtcagcgaccttcagactcatggtagaatcttctgtcatgactattccgcacaacagtttgagctaactaaattctccttaggtgaaattaaatatggcaaaacacctttttacgtctgagtccgtatcagaagggcatcctgacaaaattgcagaccaaatctctgatgccgtgttggacgctatcctgcaacaggatccgaaagcacgcgtcgcctgtgaaacctacgttaaaaccggcatggttttagttggcggtgagatcaccaccagcgcctgggtcgatatcgaagagattacccgtaatacggtgcgcgaaattggctatgtgcattccgacatgggctttgacgccaactcttgcgcggtactgagcgcaattggcaaacagtctccggatatcaaccagggcgttgaccgcgcagacccgctggaacaaggcgcgggcgaccagggcctgatgtttggctacgcgacaaatgaaaccgacgtactgatgcctgcgccaatcacctacgcgcaccgtctggtacagcgtcaggctgaagtgcgtaaaaatggcaccctgccatggttgcgtccggatgcaaaaagccaggtcactttccagtatgacgacggcaaaatcgtcggtatcgacgccgtggttctctctacgcagcacgcagaagatatcgaccaaaaatcgctgcaagaagcggtgatggaagagatcatcaaacccattctgccgtctgaatggttaaatacgtccactaagttttttatcaacccaaccggtcgttttgttatcggcggcccgatgggcgattgtggtctgaccggtcgtaagatcattgttgatacctacggcggtatggcgcgtcacggcggcggcgccttctccggtaaagatccgtctaaagttgaccgttctgcagcttacgctgcgcgttatgtcgcgaaaaacatcgtggcggcaggtctggcggatcgctgtgaaatccaggtctcctacgctatcggcgtagcggagccgacgtccatcatggtggaaacgttcggtactgaaaaagtgcctgctgaacagttgattctgctggtgcgcgaattcttcgacctgcgcccgtacggcttgattcagatgctggatctgctgcacccgatctacaaagaaactgcggcttacggccacttcggtcgcgaaaacttcccatgggaaaaaaccgacaaagcgcaactgctgcgcgatgctgccggtctgaaataatcgcccgcgcctgacgctgtttttcagccaggtaaaccataccgtacttatcaaggccagcgccctgctggcctttatcattgctgatacacgcaacgttatcagatattccagcgtgaatttatactgacctttttgtgatgcgcagcacaatccactctcccctttcgtttcttcgactacactttttatcattcagtttcagtcatcatgaaagcggttacattcattttcattaagaactgaccgcctcactatcggtatgctaattctacgatgaaaatattacataatttttcaactttgtctgaataccaggcgattgatatggttataagattattaaaactattatttttcagataattaaataatcaccgagataaatagtagtgtaaacgattacaccattgtgattagcctcacatctttttacggcgtactcacctactcttaacatcgataaaattgctaacccaaccggagggcataatgcctgacaataaaaaacaagggcgttccaacaaggccatgacattttttgtctgctttcttgcagccctggcaggattactttttggcctggatatcggcgttatcgccggtgctttacccttcattaccgacgagtttcagattaccgcacacactcaggaatgggtggtcagctccatgatgtttggcgcggccgtcggcgctgtcggcagcggctggctctcctttaagctgggtcgtaaaaaaagcctgatgatcggcgctatcctgttcgtcgccggttcgctgttctccgctgcggcgcctaacgttgaagtcctgattatttctcgcgtgctgctgggtctggccgtcggcgtcgcttcctacactgcaccgttgtacctgtccgagatcgcgccggaaaaaattcgcggcagtatgatctcaatgtaccaactcatgatcaccatcgggattctgggcgcttatctgtcagataccgcgttcagctacagcggcgcatggcgctggatgctcggcgtgatcatcatcccggccattctgctgctgatcggcgtcttcttcctgccggacagcccgcgctggtttgcggcaaaacgccgcttccatgatgctgaacgcgtcctgttgcgcctgcgtgacaccagtgcggaagcaaaacgtgagctcgatgaaattcgcgaaagtttgcaggttaaacagagcggttgggcgctgttcaaagagaacagcaacttccgccgcgccgtgtttcttggcattttgttgcaggtcatgcagcaatttaccgggatgaacgtcatcatgtattacgcgccgaaaatcttcgaactggcggggtacacgaataccacggagcagatgtggggcaccgttattgttggtctgactaacgtgctggcaaccttcatcgctatcggcctggttgaccgctggggccgcaagccgaccctgacgctgggcttcctggtcatggcgattggtatggggattctgggtacgatgatgcacatcggcatccattcgccgtctgcgcaatacttcgctatcgctatgctgctgatgttcatcattggatttgcgatgagcgctggtccgctgatttgggtactgtgctccgaaatccagccgctgaaaggccgcgatttcggcatcacctgctccaccgcgaccaactggatcgccaatatgatcgtcggcgcaacgttcctgaccatgctgaacaatctgggtaacgccaacaccttctgggtctacgctggcctgaacgtgctgtttatcctgctgaccctgtggctggtgccggaaaccaaacacgtttcgctggaacacattgaacgtaacctgatgaaaggtcgtaaactgcgcgaaatcggcgcccacgactaatccctccacgcttcctcctgccacaggaggaagcgtttttcttgcagtccctcttccgtcgcactattctctgccgctatgaaaacccctcgtctccctatcgctatccagcaggccgtgatgcgccgtctgcgggaaaatctcgcccaggcgaacctcaagctcgatagacattatccggagccgaaactggtgtatacgcaacgcggcacctcggcgggcaccgcctggctggagagctacgaaatccgcctcaacccggtgttactgctggaaaacatcgacacctttatagcagaggtcgtgccgcatgaactggcgcatctgttggtgtggaagcacttcggacgcaaggctccgcatggcaaggaatggaagtggatgatggaaagcgtgctgggcgttccggccagacgtactcatcaatttgcgctgcaatccgtacggcgcaacacctttccctaccattgccaatgccagcaacatcaactcaccgtccgccgtcataatcgggtagtacgcggcgaagcggtttatcgttgcgttcactgcggcgaaccactggtcgccgggtagtttcccgaaacgtccgggaactttcctgagcggactgattgcatacagacacaactttcgttacgttgcgggctcgttttgctatggagtgtgcaatgtaccgtaatttttcttttgccgctgcgttgctggccgcagcgttttcaggccaggccctggccgatggcattaacaatttttctcaggccaaagcggcgagcgtcaaagtcaatgccgacgcgcccggcagcttttactgcgggtgccaaatccgctggcagggtaaaaaaggcgtcgtagacctggagtcctgcggctataaggtgcgtaaaaacgagaatcgcgccagacgcattgagtgggagcacgttgtccccgcctggcaattcggtcatcagcgccagtgctggcaggacggcgggcgaaaaaactgcgctaaagacccggtctaccgcaaaatggaaagcgatatgcataacctgcaacccgcgattggcgaagtgaatggcgatcgcggcaactttatgtatagccagtggaacggcggcgaaggtcagtacgggcagtgcgccatgaaagtagatttcaaagcgaagctcgccgagccgcccgcccgcgcccgtggcgcaatcgcccgcacttatttttatatgcgcgaccaataccaactgaaactttcccgccaacaaacgcagctttttaacgtctgggataagcagtaccccgttaccgcctgggagtgcgagcgcgatgcgcgtatcgcgaaggtccagggtaatcataatccctatgtgcaacgcgcttgccaggcgcgaaagagctaacctacactagcgggattcttgttaacccatgccctggatagccaaacgccggggccatgacgcggatttttttattatgcgtattccccgcatttatcaccctgaattgttgacgtccggtacgcagatttcgttatgcgaagatgcggccaaccatattggtcgtgtactgcgcatgggagcgggacaagcgttacagctgtttgacggcagtaatcaggtattcgatgctgaaatcattagcgccagtaagaaaagcgttgaagtgcaagtgatgaaaggcgaaatcgacgatcgtgaatcgccgctacatatccatctgggccaggtgatgtcgcgcggtgaaaaaatggaatttactatccagaaatcgatcgaactaggtgtaagcctcattacgccactgttctctgagcgctgcggcgttaaactggataatgaacgtctgaacaaaaagcgccagcagtggcaaaagatcgccatcgccgcctgcgaacaatgcgggcgtaaccgggtgccggaaattcgcccgccgatggcgctggaagcctggtgcgccgagcaagattccgggctgaagctcaatcttcatccgcgcgcccatgccagcatcaacactctgccgctgccggttgaacgcgtccgactgctgatcggcccggaaggcgggctgtcggcggacgaaatcgcgatgaccgcgcgctatcagtttactgatattctgttaggacctcgcgttctgcgtactgagacaaccgcgctcaccgccattaccgcgctacaggtgcgttttggcgacttaggatgaagcgttaacggagaaaataatgatcaagctcggcatcgtgatggaccccatcgcacacatcaacatcaagaaagacaccagtttcgctatgctgctggaagcccaacgtcgtggttatgaacttcattatatggagatggccgacctttatctgattaacggcgaagcccgcgcccgcacgcgaacgttgagcgtggagcaaaattacgataaatggtacgagttcggcagcgagcaggagattaaactcgccgatctggacgtcattttgatgcgcaaagatccgccgtttgataccgagtttatttatgcgacctatattctggaacgcgctgaagaagaagggacgctgatcgtcaacaaaccgcaaagcctgcgcgactgtaatgaaaaactgtatactgcctggtttgccgatctgacgccggaaacgctggtaacgcgcaataaagcgcagctcaaagcgttttgggaaaagcacggcgatatcattatgaaaccgctggacggtatgggcggcgcgtccattttccgcgttaaggaaggcgatcctaacataggcgttattgccgaaacgctgaccgagctgggcaaccgctactgcatggcacagaactatttgcccgcgatcaaagatggcgataagcgcgtcctggtcgtcgacggcgagccggtgccttactgcctggcgcgtattccgcagggcggcgaaacccgcggcaacctggcggctggtggtcgcggcgaaccccgtccgttgagcgaaagcgactgggaaatcgcccgccgcgttgggccaacgcttaaagccaaagggcttattttcgtcggtctggatattatcggcgaccgcttaacggaaattaacgtgaccagcccaacctgcgtgcgtgaaattgaagcggaatacccgatctctatcaccgggatgttgatggacgccatcgaagcgcgtctggcgaagtaaaggtttattgcccggtggcgtgcgcttaccgggcctgagcaatcacgccgccccggtcggataaggcggcgcatcagcatcgccatccggcagtctattgcccgataaggccaccgtcctttggcaaaagacggcttatatgagtgacaaccgtccgctttccccacatactgaacactgtcgtttttttgaaccaggaaacagaacctctgacaatgaatttacagcatcactttcttattgccatgcctgcgctccaggacccgattttccgccgttccgtggtgtatatttgcgagcacaaccaggacggcgctatggggattattgttaataagcctttggaaaatctgcaaattgaagggattctggaaaaactaaaaattacgccggaaccgcgcgattcgtcaattcgtcttgataaagccgtgatgctcggcggcccgctggcggaagatcgcggatttattctccatactccgccgtcacgtttcgcctccagcattcgtatctcagacaataccgtgattaccacctcccgcgatgtgctggaaacgttaggtacccaacaacagccttccgatgtactggtcgcgctgggctacgcctcctgggataaaggccagcttgaacaagagctgcttgataacgcctggcttaccgcgcccgccgatctcaatattttgttcaaaacacccattgccgagcgctggcgcgaagcggcaaaacttattggcattgatattctgaccatgcctggcgttgcggggcacgcctgatgagcgacaccttactggcctttgacttcggcacaaaaagcatcggcgttgcaataggacaacgcattaccggcaccgcccgtccgcttccggcaatcaaagcacaggacggcacgcccgactggatgctcattgaacgtttgctgaaagagtggcagccggacgaaattattgtcgggctaccgctcaatatggatggcactgaacagccgctgacggcgcgcgcacgtaaattcgccaaccgtattcatgggcgtttcggggtaactgtcacgctgcacgatgaacgactcagcaccgttgaagcacgctccggtctgtttgaacgaggtgggtatcgcgcactgaacaaaggcaaagtggactcggcctccgccgtgattatcctcgaaagctattttgaacaggggtattaaagccgtttttgtcagcaggcggataacgcggtcacggttgccaggcttactgggcaataagctggtttaatgccttcaacgcctgtaaacgcgcagccgcctccgcctcatcaatccgccacattcccgcaaaggccagcgctgcggcgtgcttgcctagcggttgcgccatagaaacttcaccatcagcgtgatgccacagcacgtatccccgctggcgctgctgcgccacatgcggcgccagattacgccattgctccggagtaaaacgctgcattagcgcctcatcgctttctgccgccagtaacgccactcctgttaccgactgccaggccgggcacatgcgaaaccccgccagcgcctgacttccctgcgaacccggcgtagagtgataaatatagataatctggtcttcccatagcacgcctaatgccaccacgatgtctttgggcgcatggcgttcaaggataggcaacgcatgggagaacagcgctgaaccacgaatcgcctgcgccgccaaagcatgaatgcctggcccgggtaaatagcgtcggtgctcatcctgcatcgtgagtccaatagaggccatcgtcattaacaggcgattaacgcgcgtggtattaatatccatcagccgggcaagctcgcgacatccgatagcacggtcgctggagaccagatattgcagacagcgaatgccatctatcaggctttgattcggttgtgatgacatcgttaaatggcttcgctgtggttttaacaaagctgcgattttaacgccggttcgccaggatacaagcctgcatgccgttcaatccaccgcgccagtcaacactttacaacccccctacgccgccatcttcgctacagtcgtccctgcgcctgacgccattgcgcgctctgggcgaatgtcatcatcccctgctgctgcccggtttgtatcacgtgggccaactgatggagtttgccttcacggatcaaattccctgtggctggcgtattaatcagtaattcaaacaacgccacgcgcccatcctgtctgtcgacctccagtttttgtgatagtacggcgcgcagactacccgccagttggctgcgtaccggttctttttcctgcgccggaaaactatccactaatctttccaccgcctgcgccgcaccgcgagtatgcagggttgccagtaccagatgccccgtttccgccgccgtcagcgccaggcgaatggtctcgctgtcacgcagctctcccagtaaaatgacatcgggatcttcacgtaacgccgcgcgcagcccggcggcaaaagtggcgcaatgctggccgatttcccgctgctgtatcaggcaacgcttgctggtgtaacggtactcaataggatcttccagcgtcaggatgtgtttatcggcatgttgattaagatgtcccaccatcgccgccagcgtagtggatttcccgcagccagtagcgccagtgaccagaatcagtccgttctcgctggcaagcagtgcgggtactatcggcggcgtctggatttccgccagatcaggacaacgctcgggcaatagccgtagcgccagcgacgttccctgttgatgtgtgaacgcactggcgcgcaggcgccgcgtgccagacagcgagacggcgaaatcaagctggccgtgcgttcgccactgatattgttgcgcatcattaagccaatcaagcagaagcctgtcgacatcaggcgcggtaaaaggcgcgttctccatgcgtccttgtttgcgccatcgcgcaggccaggcgttacacaggtgtagatccgagacgttatgctttacactaagcgtcacaatttcttccatattcatataaacatcctcggaaaatgaaagatatcgcgcataacctggcatacatccgggacaaaatctccgccgcggcgacgcgttgcggccgctcttcagaagaagttacgttgcttgcagtgagtaaaaccaaacctgcgagcgacatcgcagaagccattgccgccggacaacgggcatttggtgaaaattatgtacaagagggggtggaaaaaatccgccactttcaggaagcgaaagtggaaggcctgcactggcactttattggccctttacagtccaacaaaagtcggctggtggccgagcattttgactggtgtcataccatcgatcgcctgcgtatcgcctcgcggctgagcgaacagcgtccggataatctgccggcgctaaatgttctgatccaaattaatatcagcgatgaaaacagcaaatcaggcattccgctggcggaactggatgagctggccgctgcggtggctacactgccgcgtctgcggcttcgcggactgatggcgatcccggcgccagagtcagattatgtaaggcagtttgaagtcgcacgtcaaatggctgtagcatttgccgggctgaaagcgcgctaccctgacgttgataccctatctctgggtatgagcgacgatatggaagccgcgattgcggcaggtagcacaatggtgcgcatcggcaccgctatctttggtgctcgtgattacacaaaaaattaaggaaaactgaggaacgccatgaatacgttgaccttcctgctctcaacggtaattgagctgtataccatggtgctattattgcgcgtgtggatgcagtgggcccgctgtgacttttacaaccctttctcccagttcgtggtgaaaattacgcagcccatcatcggaccgctgcgtcgtattatcccgccaatggggccgattgacagcgcttccctgctagtggcgtttattcttagcgttattaaggcgatagtgctgtttaaggtcattacgtttcaggcgattatctggattgccgcagtgcttatcttgcttaaaacaatcggcctgctgatcttctgggtgctgctggtcatggctatcatgagctgggtgagccagggtcgtagcccgattgaatatgtattgattcagcttgccgagccgctgctcagcccgattcgccgtatactgcctgcgatgggcggcatcgacttctcgccgatggttctggtgctgctgctgtatgtcgttaatatggggatcgctgaagtcttacaagcgacaggcaacatgttgctgccggggctgtggatggcgctatgagtgctgtgactcgctgcgaagacggtctggtgttacggctttatattcagccgaaagccagccgcgacagtattgtgggcttacatggcgacgaggtgaaagtcgccattactgccccgccggttgacggtcaggcaaacagccatctgaccaagtttcttggtaaacagtttcgcgtggcgaaaagtcagatcgtcatcgaaaaaggcgagctgggccgtcacaaacaggtaaaaattattcacccgcaacagatcccgccggaaattgcggcgttaactgagtaggtattccatgcaaaaagttgttctcgcaaccggcaacgccggtaaagtgcgcgagctcgcgtcgctgttaagcgattttgggcttgatgtggtagcgcaaacggaactgggcgtcgattccgcggaagaaaccggcctgacgtttattgaaaacgcgattctcaaagcgcgccatgccgccaaaatgaccggcctgcccgccattgccgatgactccggtctggccgttgacgttttaggcggcgcgccgggtatctattccgcgcgctattctggcgaaaacgcgacagatcagcaaaatctggaaaaactgctgcatactctacgggatgttccggacgacaaacgccaggcgcgattccattgtgtactggtttatttgcgtcatgcggaagatcccacaccgatagtctgtcacggtagctggcctggcgtcattactcgccaggcggccggaaatggcggatttggctatgatcccattttcttcgtaccgtctgaaggcaaaaccgccgcagaactgacccgtgaagaaaaaagcgcgatttcccaccgtggacaagcgctcaagctgctgctggatgcgttacgcaatggctaaactaccgccgctcagtctttatattcatattccctggtgtgtacaaaaatgtccatattgcgacttcaattcccatgcgttgaagggcgaggtgccacatgacgactacgtccagcatctgttaaacgatctggatgccgacgtcgcttgggcgcaagggcgtgaagtaaagaccatttttattggcggcggtacgccaagcctgctttccgggccggcgatgcaaacgctgctggacggcgtgcgtgcgcgcctgaatctggcggcggatgcggaaattactatggaagcgaaccccggcacggtcgaagccgaccgcttcatcgactatcagcgcgccggcgtaaaccggatctccattggcgtgcagagctttagtgagcctaagctgaaacgtcttggccgtattcacggtccacaagaggcgatgcgggcagcaagactggcaaatgggcttgggctacgcagctttaacctcgacttgatgcatggattgccggaccaaacgctggaagaggcgctgaatgatttgcgacaggcaattgcgcttaatccgccgcatctctcatggtatcaattgacgattgaacccaacactctgttcggttcgcgtccgccggttttaccggacgatgacgctctgtgggatatctttgagcagggccaccagttattaaccgccgcgggctatcagcaatacgaaacgtcggcctatgccaaacccggttatcagtgccagcataatctgaactactggcgctttggcgactatctggggattggctgcggcgcccacggtaaagtcaccttcccgggcggcaggatcctgcgcaccaccaaaacccgtcacccacgcggttatatgcagggacgttacctggaaagccagcgtgacgtgagtgatgacgataaaccctttgagttctttatgaaccgttttcggttgctggagcgcgcgcctcgcgccgaatttgtcgactataccgggcttacggaagcggttattcgtcagccaatcgacgaggctattgcccagggctacctgaccgaatgcgagcaatactggcagattacccggcacggtaaactgtttttaaactctcttcttgagttgtttctcgcggaataacaaggataagcctgtcgcgccagcgggtaaaatacctgatggcgcgacgcttaccgacctgtggcggttaatgcgccgccggcaagcgcattatttaataactcctttacgacgcaaatcgtccgtatcttttttccagcgctcgtaaccgtcattaatatccataattttcacacggatatcactctgttgcatctgaagtttctgtaccgctatattcagcggatattgtcctttctctaacgttatccagtcattctgcgcttttcgacgcagctcttctgatttcaaaaatacctgccgccgttgctcgtgtatgtctaaatctcttttctgctgaatagccgcttcattgcacggctcactctgcttacggcacgcgtctaatgccggttgatagacctctttttcgtatttctcggcatatacgctgctatcgttggcttttacataatcatcgcgctcttttaacgtctttttaaacgcctcagcgcgggtcaacggtttcccatcagcgccttttccccaatacgcgtccgcttcttttttagctaccgctattttcttatccagggcagagagttgttcttcaagaccggggatcgacgctttctgcgcacgccaggaggcttcaatgttgccaaaccgatagttaaaatcatcgctgttgacgatcaggtatttatcattcgttttaatgtcgtcaatagcccggccctgatcgctggctgccatttgtaatgagtaatagttcaccgtccagccagaggctggcgtccctttactggttaacatggcagaaaatttaacgggacgatctttggtccaggttttttcaacaaaataataatccgccgccataccaacgccggtatacatatcttcacgggaagaaatatccccttcggcagaccaggtggcctgattgcccgtcgaatcaagattttttaaggtaatggaatccagtttaagtatgccgtggtactgcttactaaactgttcttttaagatgttatcggagggttgagcaacctctgcccaactatagcctgaaatcagggcaaacagcgctgcgccagcaatccattgtcgaaccacttgtggacctcccgtccagagacatgacgcccacaattatcataaccatgatgataattagcaagataatagtgttggttgtgcgagaggtcttccaaaaatagccccggccttccgaccggggcattatcattaatactgattgaacatcgtctggatctgttttggatctttagtctgggttaacgccagttgcagtaagacacgcgctttttgcgggttcagcgtgccggaagcgacaaagccgtattttgcatcgtcaacttccgcatcctgcgtggttgcgccagtcggcacacgtgaagaacgcaccactaccgtaccgttgtgcgcggcggtcgccagggtatcaaagaccgttttatacaggttgccgttacccacgcctgcgctcacgatcccgtcataacccgcgtctaccagcgcttttgccggcagatcggacgcattcgcatagttataaacgataccgactttcggcaacgcggtcagcttcgacacgtcgaacggggtggaggtggtatgtttacgctctggcgtacgctggtagtcaattttaccgttgtggatataacccagcgggccgtagttaaccgctttaaacgtcgccacgtcagtcgtattggtcttagtgacgtcgcgtccgtccatgacggtatcattcattaccaccagcacgccgcggttggcagactgtttatcagccgctgttactaccgcattatagaggttgaacgggccatctgcgctcattgacgtggagggacgcatcgcgccgaccagtaccaccggtttattgcatttcacggtcagatcgaggaaataagcggtctcttccatcgtatcagtaccgtgggtgatcacgaaaccgtcggtgctgtcgcactcggtattgatttttttcgccagcgtgagccagacttcatcgttcatatcctgcgagccaatgttaacgacctgctcgcctttcactatcgcaatgtccttcaattgaggaacggcatccaccagattttcgacaccgactttacctgccgtataatttgattttgttgctgaatcaccgccgccagcgatcgttccgccggtcgctaagatggtgatattcggtaaagcgaacgctgcgccgctgaaacccattaccagagcagctaatgccgttttcctgaaaaactccatgttatatctccagttatgtcaactggtcgcattatctctatattgcagacgaataatgtgacgccatacgattaaccagcgatatatatccgacagagagtattttttagagatggataacaaaatgcaggaaaaaacagaataaaaaggcgcagatacgatctgcgccattgtttaaaaaggaaagattacttcaggctgccaaccagcgctttgcggctatcttctaaggtcactacgcggctacagacatctttgccaaactgctggaaatctttctcctggtttttccattcgttctggatagcggtttgcaaaccaccgaggctgcccatcacaccctgtaaaggattgccgccgcctttaagcactactttggcgcccatttcgttaatgctgtcctgcaaaataccgcccatcgcctgattcaccaactgctgaccgtcggcacgcacctggtcgatagccttatagtggaacgtcaggccgtccgtacgatgttcaataatgcggttcatttgcgcttttaattgcgcatcaagcttcgtcagacggctacgcatgttgctgctttcgcccacctctttagcgatgattttatccagcgccacgcggcctttttcgacgcgcgatcgggcgccctcatcaatccacggcagcgcgcttcgcagttccgcctggtaatctttcgcttgctcgcgttgcgcggcgctaagggtgtactgcttaccgttgtacatcacattgccgtccggcgtgatcaccaggttgccgttttcacctttcacctgcaccgtttgtggactcaggatcacatcgtcacgcggcgtgacgctgcatttgtaatctgcatgagcggccatcgccgtaaacgttagcactgccgccagcagcgttttgcgcatcataactttccctcaagacaaagcgggccggcatttgccgaccctgtacttattagtcccaccaaacgtcgaaaagttcgctggttcggacttcttcaaggttgcgcgcttccagccacttacgcacaatcgcctgatgttcttcggtacatttaccgatttcctgcatacaaatcagcccttcccaggccaggtagccgctgccgtcaaacgccagtttattaggctcaataacgtcattaataaagtcatcgacagtcttatcgacctgctcttcagatgtaccttccggaaaacgccatgccaccgaaaatcctaattcctggaattcgtcaatgtgcatttttttacgcagacgacgactacggttctttgccattatttcaccctctcgaacattaagtcccatacgccatgaccaagacgatggccacgttgttcaaatttcgttaccgggcgcgattccgggcgcggtacataatcattgctctctgacagatttttgtacccgtcgatagaagacatgacttcaagcatgtgttccgcatacgcttcccaatcggtcgccatatggaaaacgccgcccaatttcagcttgctcaataccagttcagcaaacggcacctgaacgatacggcgtttattatgacgcgctttatgccacgggtcagggaaaaagagctgaaccatcgataaagaattgtcaggaatcattttatgcaacacttctaccgcgtcgtggcacatgacgcgcaggttttcaacgccctcttcatgagcggatgccagacacgcgccgacaccgggtgaatgcacttcaatgccgaggaaattctgctccgggcgcgctttcgccatcgccacgagagacgcccccatgccaaaaccaatctccagcgtcaccggcgcttcgcgaccaaacaacgtggcgaaatctaccggcgcttcgctgaactcgacgcccatcaccggccagtagttttccagcgcgtgttcttgcccctttgtcagtcgcccctggcgacgaacaaaactacgaatacggcgcagcgggcgaccgttttcatcaaattccggtgaaatgacgtcgtttttcataaaagtgtagtctgctgtgtttgagttctgaaaacgggcattatccaaagttagttgccggatgcaagcatgaagcgcactgcggaaagttccggtttacaccctgcggcctctgtgctgcaatcttgcccccggcaataatgaatgagtttccatgcaagcgtctcaattttcagcccaggttctggactggtacgacaaatacgggcggaaaacgctgccctggcaaattaacaagacgccttacaaagtatggctctcggaagtcatgttgcaacaaacgcaggtgacgacggtgattccttactttgagcgatttatggcgcgctttccgacggtaacggatttagcgaatgcgccgctggatgaagtactccatttatggaccgggctcggctattacgcccgcgcacgtaatttgcataaagcggcgcaacaggtggcgacgcttcacggtggagaattcccgcaaacttttgccgaaatcgccgcgctccccggcgtcggacgttcaaccgccggcgcaattctctccctcgcgttaggtaaacattatccgattcttgatggaaacgttaaacgtgtgctggctcgctgttatgctgttagcggctggcctggaaaaaaagaggtggagaatacgctgtggacgttgagcgagcaagtgacgcccgcacgcggcgtggagcgttttaatcaggcgatgatggatctgggcgcgatggtttgtacgcgttcaaagccaaagtgcaccctgtgtccgctgcaaaacggttgtatcgccgctgcgcatgaaagctggtcatgctatccgggtaagaaaccgaaacagacgttgccggagcggacgggttactttttattgttacagcataatcaggagattttcctggcgcagcgccctcccagcggtttatggggcggactctactgctttccgcagttcgccagcgaagatgaattacgtgaatggctggcgcaacggcatgttaacgctgataatttgacccagcttaacgcgtttcgccacacatttagccatttccacctggatattgtgcctatgtggcttcccgtgtcgtcactggacgcctgcatggatgaaggcagcgcgctctggtataacttagcgcaaccgccgtcagtcggactggcggcccccgtggagcgcttgttacagcagttacgtaccggagcgccagtttaacgccccggtcgatgaagaggatgacttatgagcagaacgattttttgtacttacctgcaacgcgacgctgaagggcaagattttcagctctaccctggcgaactgggaaaacgtatctataacgagatctctaaggacgcgtgggcgcagtggcagcataagcagaccatgttgattaacgagaaaaagctcaacatgatgaacgccgagcaccgtaagctgctggaacaggagatggtgagcttcctgttcgaaggcaaagacgttcatatcgaaggttatacgccggaagataaaaaataggcccgttgctgaatgacgctgcgcttattcggcctgtgagttatgccggataagcccttagcgccgctgcccggcaacatggcataacgacaacacaacatgcactcccggaatgatgaaaaaattactcgcgcttgctgttattgcgccgttgctcatctcctgctccagttcgaccaaaaaaggcgagacgtataatgaagcctgggtcaaggataccaacggctttgatattttgatggggcaatttgccaacaatattgaaaatctgtggggatataaggaagtcctgattgccgggccgaaagactacgtcaaatataccgatcagttccagacccgtagccacatcaactttgatgatgggaccattaccgttgaaaccatcgccgggacggaacctaccgcacatctgcgccgggctattattaaaacgttgctcatgggtgacgacccaacctccgtcgatctttactccgatgtcgatgacataaaaatttctaaagaacccttcctgtatggtcaggtcctcgacaataccggccagcctattcgctgggaaggccgcgccacgacattcgcggattacttgctgaaaacgcggctcaaaagccgcagtaacggcctgcgtattatttacagcgtcaccattaatctggtgccgaaccaccttgataaacgcgcgcataaatacattggcatggtacgccaggcctcccgtaaatacggcgttgacgagtcgctgattctggcgattatgcaaacggagtcctcgtttaacccgtatgcggtcagccacgcggatgcgctgggcctgatgcaggtggtgcaacacagcgccgggaaagatgttttccgttctcagggtaagtccggcacgccaagccgtaacttcctgttcgaccccgccagcaatatcgataccggcacagcgtatctggcgatgttgaataatgtctatctgagcggtatcgagaatccgacgtcgcggcgctatgcggtcattactgcctataatggcggcgcaggcagcgtattacgcgtattctcgaacgataagattcaggccgcgaatatgattaaccgcatgtcgccgggggatgtgtaccagatattaaccacccgacatccatctgcggagtcgcgccgctatctgtataaggtgaattccgcccagcgatcgtatcgccgccgataaaccatcgcatcccgcctctggccagcaaatgacagaggcgggaaaggcaaaagtgttaactccgtcacccttttgctttgcaatcagaaattgtttgcaaatatttgtcacaggtaacaaaaaaagcccgcctctcattgatagaatcacaccaaatcacaacggcaaatgtgccttttaaaacattcatccgctctcaggtgtgaggaaattaacatgaatcttaagctgcagcttaaaatactctcttttctgcagttctgtctgtggggaagctggctcactaccctgggctcgtatatgttcgtcaccttaaaatttgacggcgcatctattggcgcagtttatagttcactggggattgccgccgtctttatgccgaccttgttaggcattgtggctgacaaatggctgagcgcgaaatgggtctatgccctgtgtcatgtcgtcgcgccatcacgctattcatggccgcggaagtcactacgcctggggcgatgttctttgtgatcctgcttaactcgttggcctatatgccgacgttgggcttgatcaataccatatcgtattaccgcctgcagtctgccggcatggatatcgtgactgacttcccgcctatccgtatctggggcaccattggctttattctggcgatgtggggcgtgagtttctccggtttcgagctgagccatatgcagctttatatcggcgcgacgctttccgttctgctggtactgtttacctttaccctgccgcacattccggtggcgaaccaacagaaaaaccagagctggacatcaatgctgggccttgacgcttttgcgctgtttaaaaataagcggatggcgattttcttcatcttctccatgatgctgggcgcggaactgcagatcaccaacatgtttggcaacaccttcctgcatagctttgataaagatccgctattcgccagtagctttatcgtgcagcacgcctcggtgatgatgtcgatttcgcagatttctgagacgttattcatcctgaccattccgttcttcctgagccgttatggtattaagaacgttatgcttatcagtattgtggcgtggatgctgcgtttcggcctgttcgcttatggcgacccgacgccgttcggtaccgttctgctggtactgtcgatgattgtgtacggctgcgccttcgacttcttcaacatttctggctcggtgtttgtcgaaaaagaagtacgcccggaaatccgcgccagcgcgcaggggatgttcctgatgatgaccaatggcttcggctgtatcctgggcggcattgtgagcggtaaagtggtggagtattacactcaaaacggcattaccgactggcagaccgtgtggctcatcttcgcaggctactcgctggtgctggccttcgcgttcgtagccttgttcaaatacaaacacgttcgcgttccggcaagttcgcaacccgttgcacattaatccttgccctgtttcgcaggccggataaggtgtaaatgccttatccggcctgcaggcaacgttactttaaaacatatccgtacaagcgttgaattccatcggcatcggtctcgctatataccccctgcaattccggcgaaaaaccgggcaacagattgatgccctcttccagcgccaaaaaataacgctgcgccgcgccgccccaaatctccccgggcaccacgcacagtacgcccggcgggtatggcaatgccccctcggcagcaatacgcccgcccgcctcgctgatacgcaccagttctacatcgccgcgaataaaggcgctgttggcgtcctgtgggttcatcgccacatgcggcaggctttctttgcggaacatcgctttttgcagatccttaacgtcaaagctaacgtacagattgtgcatctcctgacatagctcacgcagggtgtaatcgcggtagcgcaccgggtatttctgaaaaaccgtcggcaatacatccgcaagcggcgtatcgtcttcaatgtgccgttcaaattgcgccagcatcgcgaccagccgcgccagtttctcttcgctctcggcgggtgtcagcaagaacagaatcgagttgagatcgcacttctcaggcacaataccgttctcacgcagatagtgggcgagaatggtcgccgggatgccgaattcggtgtactgcccgctatcggcatcaatacctggcgtggtcagtaacagtttacaggggtcgacaaaatactggtcatccgcataaccctcaaagccatgccatttcgccccgggctcaaaactgaagaaacgacgattgctggcaatggtctccgtcggatatgcctgccacggcttgccgtcaaccaccagtgggataaagggctgaagcagtttgcaacgggcgagaatggctttacgcgcgtcaatgcccagcgcaacgcactccgcccacaggcggcgaccgctctccccttcgtggattttggcattgacatccagcgccgcaaacagcgggtagaacggactggttgaagcatgcaacatgaaggcgttgttcaggcgtttgtgcgggcaaaaacgcgcctggccgcgaatatggttatcttttttgtggatctgcgaggtttgtgagaaccccgcctgttgcttatgtaccgattgggtcacaaagatccctgggtcgttttcattaagctccagccgcaacggcgaggtatccgccatcatattgataaactgctcatagcctacccacgcggagtcaaacagaatgtaatcgcagagatgcccgattttatccaccacctgacgggcgttgtaaatagtgccgtcataggtacccagctgaatgatcgccaggcggaacggacgcagcgcatcggcgctttccggcatcacgtcacgaatctggtcgcgcaggtacgtttcatcaaaacagtgcgcatcaataccaccgataaaaccaaacgggttacgcgccgcttcaagatagaccggcgtcgccccggcctgaatcagggcgccgtggtggttggatttgtgattattacgatcaaacagcaccagatcgccgcgcgtcagcagggcgttggtgaccactttattcgccgccgaagtcccattcagcacaaagtaggttttatccgcattaaacacttttgccgcaaatttctgcgcgtgtttggcagaaccttcatgtattagcagatcgccaagtttcacatcggcgttacacatatccgcacgaaacaggttttcaccaaaaaagtcataaaaatggcggcctgcgggatgttttctaaaaaactcgccatgctggtgccccggacaagcaaaggtactattccccatgtcgacatattgggtcagggtgtcataaaagggcggcagaagttccgcttcgtagcgactggcggcgttttccaactccagccattcctgcgcgttcccgccgattaccgccgtaacgccgacaggcgcgctgacgggttcatccgcaagcataaacaccggcaggtgaaaaccggtgcgtttaagcaacgccagaataccgctacggctgtcggcagtggtaatgacgactgcggccacatcggtaaagtcggtactgtccagcgccactacgtttcggtgggtggatagacgggggatgagttcaccgctggcggcaatattcattgatttcataagcgcaaatacccgtttcgggagtagagtaaccccagacaaggcccgatgccttgcccaacgagatgccgggtcaaactggataccagctccgaccgccagacatcagtaaaaacagactgtttctgattttactgttgtcctgcagtgagcgtgcgctgccctcaccgcatagcggggatgacaaaaaaaggaaagaaaggggcaaacctcgcgcagtcaggcgacagtgaagacaatataaaggcgctatgttcatcccggcgagccccatgctggcaggagaaatttcgcgcaatcatggcacctttcaccaggcggcgcaaggtaaaatcagcgctctatacgtcacagataatcaagctattaacagcttaatcgcgtgataataaggcaatttgaaagacaaataacaggagtcattgtggtaattggaccttttattaacgctggcgcaattttattcggcggcgttattggcgcgctgttaagtcagcgtctgccagaacggattcgcgtctcaatgacgtctatttttggtctgtgctctctgggaattggcattctgctggtgatgaagtgcgctaatcttccggtgatggtgctggcgacgctggtcggcgcgcttatcggcgagttttgtttgctggaaaaaggcattaatggcgcagtcgcgaaaatccaacaattatttatggcatcgggtaagaagccgacacacgactcatttattcaaagttacgtcgctatcattgtacttttttgcgccagcggcaccggtattttcggcgcgatgcatgaagggatgaccggcgatccaaacattttgatcgctaaatcttttctggattttttcactgccattattttcgcctgttcgcttggcatcgccgtttcggcgatttgcgcgccgatgttgattatccagttaacgcttgccgcctgcgccaccctcattcttccactgaccacgccggcaatgatgggcgactttagcgccgtgggtggactgctgctggtggctaccggcttgcgtgtatgtggaatcaaaatgtttccggtagtgaatatgctcccggcgctgttgctggcgatgccgatctccgccgcatgggcgatgttttttgcctgattctgcgtgcaataacaacaaagtggtgatagattgtgcagtctacgttgatttgaagaaatttcattgacgaagcgaggcgattacggtttaatgcgcctcgttgcccggatagctcagtcggtagagcaggggattgaaaatccccgtgtccttggttcgattccgagtccgggcaccacctttccttttttatgctttcttatgaatacctcgatgtcttcaagtcaataagtttgaacatagactctttccagaaattattgccatatgatctccattagaccaatataaacggatgcgtgatcataataaaggcagtaatagtaagttttaacattaaacatactgcgaaatttcaattaagtttccatcagggtccctgatgtagatagacattatctcgcctgtggctccagttctctcaaccgggccttcaacaatgggaatgcctgcctgtaagatctcagacacaacatcatttatcggtgtcgatgtaataaaacataaatcggcagatcccggcgttggtctactcgcttttggttcgaactccatttcttgctgatggaggttaattttttgcgctccaaatattaacgcttttctgttttgtttaaatgttaccgcagaaaaaccaagtacctcttcgtagaatcttattgtggttgatatatcagataccgttaatacaaggtgatcaattctgtcaattatcatttgaatagactcatgatgtttatattttagggatgctacattaaaaaatagcattaacctacttttaaatcagatgcattttttttgcatctactctaagttgctgccgaaaattgggatgtgccaattcaatgatgctgagcgcacgctcggttgaagagagccccttcaggtttacggagccaaattcagtgactatccagtgcgtatccgttcgtggggttgttacaggcccctcaaggcggggaacaatacgagaaatcgtatcattcgcggccgttgagcgggtcgtaataatggaacgacctcctttagatgcatatgcgcctctgacaaaatccaattgccctcctgaagcgctgtactggtgtccaagcaaatattcagagttacaggcaccagtgagatcgatttgtaaggtagcgttaatggagacaacattctcattttgcgcaatgatccccggatcgttaacataatcgacaggccgactaaaaaaagaggggttgtcgttgagatagtcatacatatccttttgtcccatagcaaaagtaaatacagacattccccggtcgatatttttacgctgattggtaacgacgccttgttgaatcaaacttaccaaccccggattcagcgcctctgtatggacccccagatcattatgttccttgagcgcattacagatgagctccggtaatgcgccgacccccatctggagacaagcgccatctggcacaagagaagcgataatctgactgatagcaatatcttcggctacggcagtacgtattggtagttcaattaaagggacatggttttcaacaatggcgtcaatttctgaaatatggattgcagcaccttctccatgaacgcgcggcatatatttgttaacttcgacaataagctttttagctgtcctcgcaatccgggtggaataatcgtttccagttccaaaattaaaatagccatacttatccataggggacacggtgtgaataaaggtatcaataccaatatcatcagctagtaatcgcgtcgcctgatgaaaatttgaaggtacatagttaactatttttcgcccggaactctcaatcccctgacgtattaaagcccgttcaataccggtaataaacatactgtagagatgaatatagtcacttagctcataacggaaaatagtgttcccggcaatgctggctgtttcataacagtaaacccgcagatcgttgatttctccccttttcgctcgctttgccagcgcattcagcaaagctggaggctctgctgcaaacattcccatagagaggtgactgccggaggtaattaaagtaaccgcctcgtcaggcgtcacgcatttttcggcatacactgcattaacattcatcatgactctaaacctcagggcgatttctcaataagcggcgtcttcttcaggcgaacatccacagcaataaactaacattgttcgttcgaagcgcatgacctctacaccattctggttaataccacatgtccgaacggtaacgatgccttgtcccgggcgactatttgacaggcgtttgctgagtacagtgctttcagcataaagtgtatcccctgcgaaaaccggatggacggcttgtaccttatcccagccaagattggccacgaccttggcgctgacagtacgcacgctcataccggttaaaagcgccagagtgaacgttgaatcaaccagtaactttttccattccgttttgctggcgtaagccgcatcgaaatggaccggctgcacattgagagtgagcagggtaaaccacacattatcggcgtccagaaccgtccggccgggacgatgttcaaaaacatcaccgggatgaaaatcctcccagtaaagacccgaaatttctcggtagcgcccctcgctaatggttttataagcgggtaataacgtgttcataatcaattcctctgttaataaaatcaggaaaagatccctgcccgggcgagtaatctccgggcctgacgggcaacggctgcatctatcatcatgccgctaacgatcccgacgcctttggcattctctgtcagtactgcacgagcatgattaatttctgccgttgtaggagtaaatgcggcgttgattacactaatctgagcggggtgaatagccgattttgcagaaaaaccaaaactgagcgcctgcagcgtttcctctttcagacctgaaaaatcgcctatatcaaagaagggagcatctattgcaagaagccctttcatagcgcaggcagccactattctggcccgcgccagcgcaagaggctcccaggcgggtgtcgcgccaatgtcagccgccatatctgcggcgccaaacatcaacccgcagagtctgggggtggcgtccgcaatagactctacggcattaagcccaacaactgactcaataatgccaataaggcgagtatcagaaccagccatcatgataagactatccacgatttgcaggtgcgcggctgactctgttttcggaagaataatgtaatcaggaaaaaaacggcattccagtaacatatgcaggtcttcaatgccagcatgagtattcattccattaattcttaatgctattttcagcgatgagtttggtcgggatgaaaggaactgcatcgcaattttccgggcctgcgccttgtcattcggggtgacggaatcttcaagatcgataatagaaatatccgccgcactttcaactgcttttatgaaacgttctggtcgaattgctggggtaaaaagccagctacgtgtcggtgtatgagaaatatcgggcatattgcacctcctgttaacctcactatgcgctcgctggtttcattcttccaatatatgatggtgccattcttaattgcttttggagatgaggatggaactgcgccatattcgctattttctcgccgtcgctgaagagcggcatttcacgcgggctgcgacaaaattaggcataggtcagccgccgctaagccaacagattaaggatctggaaagagagctgggagcgcagctattccggagagtgcctcatggcgcggaattaaccgaggctggaaaagcattttatgatgttgttaaagggatgcctgctaccgcgacaagagccgtgctggcggcgcagcgtgttgccaggggggaatcgggcgtgttaagggtgggttttactgcctctgcggcatttaacagtgtggtgcccggcgcaatccgtactttcaagcgggcttatcctgacgttcgtttgcagcttgaggaaggaaatacaactcaactggctgatgaattgaatgaaggatcgctggatgttgcctttctgagacccggttttacaggcaatgaacggttccagctcaggttactgtctgaagagccaatggttattgtgctggcagaaacgcatcctgctgcggcgtgtaaacagattgcactctcgattctcaaagatgagttttttttactcttcccacgtgaaatcggcctgtcgctttatgacgcagtgatcaaggcctgcggtaaagcgggctttgaaccgaaaattggtcaactcgtgccgcaaatttcgtcagtcattaaccttgtgtcggcagagatgggcgtgtcgatggttccagattcaatgagacaggttaatgtcaagggagtagtataccgccccgttgcagaccagatgcccgtcgcaaagctggctctggcataccggcgcggcgatacatcgccaacgctgagaaacttcatcctgaaagtcactggctgaatgcggttatgtgagcgttgaataatcatttgaaacgtaaccaataattattggtccgattttgtgtctaaaggaatcgctaacggagcaggaactggctgcaatgtctgtggatcgacagccagataacgcccggttttactgtcgatacccacataatcgataagcttgcctttggcataaagcaccattgtctgttttgcaaatgcctcatatgcactgctcagtattttcactttatccacataatctgctgcgagattatgcgtttccagggggtcacgttgcaggttgaataattcccatggagcattacccgcctgtgggaatactgtgacaagacgacgcaatttccattccccatctatccaggccgcctgattatggagttcaacaccatattgtgtgcgaggcgcgtgcagactttcaccggtcagatagcgtttaaaactcacgccgatcattggcagtgtcggtctttcagataatgatttactggcatcaatacctgcaaattcatagagcgtgggcgcaacatcatacgccgccatcgtggcgttatctatggcgccatgatggatgataccaggaccggaaatcataaaactggtattaattcccccctgaccgctggtcgttttgtgatagcgaccataaggcgcattgctgacatcagcccagtggggaccataagagataaatgaatttttacgaccaatattttcgtaacgattatcgaattgcttccaaaaatctggttcagattcatagtgaaagccctctgccggattcaccccattatcacttaagaagaccagaatcgtgtttttatcgcgcccggtcttttttaatgtctcaataacggtgccaatctgtgcatccatattggcgatcatagcagcgtaaacctgcatcaccttcgccgtatatttctgctgttccggggtcattgcctgccattctttatcaagttccagtcctggcagaggtatgtcatcacgcaggaaacccagtttcttcaaacgagcaatacgctgacgatagacgtttgcatagccctgttcatactgacgtttaaaacgactaatccattcatccggcgcctgcagaggatcatgtggcgcagtaaaggccaaccacgcgaagataggttgttcccgtggcgtctcgctgatccagcgattaatctggctggcataggcttcgctggagtaaaaactagagggcagtgaaatgcgctgattgtcacgggtataataggtatgaaatatctccacggttcccagcggcacggcatcatcaaagtgactggcgcctccccccatcaaggcgaaagaatgacgaaagccccgatcttttggcgtcgagcctggcgtaaaaccaagatgccatttacccgccatcagcgtattgtaaccagcatctttaaagcgttcagccatggtcgtcacccgatcagtcaggcgcaattcatagccttccttacctatggtattttcataccaccacataccgcctatacccgcttgctgactggtgttcccggttaatagcatcgcacgggcgggagcagacatgggagacgtgtaatattgactcatccgcacgccgttctcagccatcgcctgcaaattaggcgttgggatttccccaccgaagggagtgatatcagaatatcccatatcatcagcgataatcacgataatatcaggacgttcgttttgcgtactgtgcgccgtaccggagaagataatgctgagtgtggcaagtgttacttcttttttcacggcttattctccatttcagactacggatgttgtacaagagcggcgggcaaatgcggcaagaggaaccatcagcccgaaaatctacccataacgtcagcacgccaggctttcagtccattcagatcccggggccaggcgcgtagcggagccagaatctccgtgaaaaaagagtaatagccgctacaaagtcggttgtagccggcactgttgatatgtgcggggcagcctccctggcagactattttcacagaacaccgttgacactcccggcgctggcttttcttaataccaaagggaagccgggttgcggaatctacggctggcgctaacgtattattagcaagctgtcccaggtaatgctggctattaatcagatgatcgcaggcatagagtttgccgtccggctccatgaccagattcgttccgcagcgggcggaatggacacaggtggcgctgatatgcgtaaaatattgtgcccatgcctgttcaatgttgatcacaaaaacccgtcccatatcgccgcgtttgcgccattgacgccagatatcaatcatgaaacgtccccagttatccgcactcaattggtaacgttgctgtagggcgttgccttcgttcatcagtggctgaaattgcagataacgagcgccaaggctaacaacatgatcgtagatggctgccgcatggcgagccatgtcatcatgcacgacaatcagtacattaaaatcgactcgatagtgttgtaacaatgtgattccccgcaacaccgccggatagctggcctcgccgcgtttgcccggacgatgatgattttgcaagtcttcactgccctcaagactgatgccaatagtaaaattattgtcgcgaaacagacggcaccaggcatcgtttaacaacgtcgcattcgtttgcagactattactgatcgtcacgccgtcaggcgcatatcgttgttgaagcgctattacctttttataaaaaccgattccggctaaaagcggttcaccgccttgccagacaaaattaatttcacgcgcactggcaggttgcgccgcaatatagcgacaaataaaaacctccagcgttgattcattcattttttctacgggcgtttcgccctgtgggtaataacaatagcggcaggccagattacatgcagggcctatgggttttgccagaatatgaaagggtatctgcgcgcgatattccgtcattacggggatttgttgttgccgtaatgtgttgagattcaacattattctgtcctgtagttatcatttctgatgcggagacatgactcacatttcgcaatagcgttcgtctggcgctgcgggcagaatgccgagagcaggctgtatctattgatacgccggttttctgcatagcgcatgacgctattgaaatgttatttagcaaatcctgtctgagccagaaattaagtctctgttaacctgcgctattacagaaaatcatagaacaggcgtctcaaaagaatatcgtcctgaaggacgagaactcacggcattttcaggagatgagtcaaccgcgacagaaaaaattatattaataattttaaattattttttagaataaccagacaggatttaaattaaaatcatttattttcaatatgttataaaaaataccgcaacatacgtcacattattaacatgtgaatgattgtgttaaccgaatgtaaattgtatgtttcaacataccactattttactgcgccccgacgcgctcatccggatggaaggagataacatgtcagccttatcaactactggccataatgacgggatcactctccattgcttacagagcattgcgcaactcattcctctgtcgtcggcggttttttatcgtgttaatgcttatttaaagccggaagcctatgttttacataatatttctaatagcacacaccaacaatatctggagcattttcaaccattagacccgctatcgccttcccgattcggccaacaggttattacagtagcgacgatgacgcccggcatctgtgctcgtcatcgccattattatcatgaatttatgctacctaatcatgtgtgcgacatgattgagatctttattcgtcggggccatcgtattatcgcgggcatttcattaatgcgcgatatacctttttccagcgaagagcgtttgcgagcccaggcagtacaaccattactgggactggcaattcatgattctcttcaggaagacaacgatctggcgtcaatattgaccgccaaagagcgtgaaattgtgggaatggtctgcgaaggggccagcaacaaattgattgcccgtcagttgaatatttctctctcaacagtgaaaacgcatttacgtaatatttttgctaaaacagaagtgataaatcgcacggaactggtttcccgaaccagaatgtcttcggtacaacattcacagcatatgtgaaagcgtgctttttaacccgcgtcaattgcgggtcttttccccattgtcatatatgcctgaattaataccactctctgagctgatgcctcaataaaatgtcatattatctggcgtcggtatcctgttgcagccattgattcatggcctgattgatcatatttatcacactaagcagaagaacacgctggtgccgctcaagccgcagataacggcgcagcggcggcattttacaaaccacttcgctagcagcccatagctcaatgccgcaataccattccttatgatgtaaaaccagcgtaaaccgacgataatccagttcactcagtgcctgttgtaaattggggaaacaattaagatagttaatcagcccggcggtacttttgctgccagtaaaaatgacgggataacgtttcagccatccgggctgatgaacgcgaattttgccctgcaaaggataattgattgtgcctttcaccctgaattcacaactgtgaatactggccatgaataaccgtttttgctgaacatggcagataacctgggtaaatgcattcagatgcagcacggcgctatgttcggtcaatttttcacaacgccagccgctcaaatcacgtaacaccatattcattaatgcgttcttaaaccaggggacggaggacatctggcgtcatctcttcattgtttcgcttttcataattgcccatagcccgttccacgacctcttctaccggaagcgggaggaaaggattaacccgttgcacacataatgtccagaataaggcataggcggcagtcaatccaagcataataccgaatggtataagtacatcccgactgttcattcctggaggcgcgatattaataatggcgataataatacccacgctcgaaataatctgaggtaagggaaaccagggggcccggtaagcgcgtggtaaatcggggcgccgaatacgtaagataacgaccgataacgttaccagcagataagctactccccaggcgcagaccgcagcgaggatcagcggaacaatgtggtcgatatcaccgttcagataccaggcatgtaaacagggaatcgcaacaccgaatgcgatggcgatgaccggtgttttaaagcgggggtgcaaccaggtcagaaaccgcggcaaagcgccgtccagcgccatgccgtatataatacgcggtactgccgccattagcgtattaatcgtcgcacatcccgctaacaacaaccccacgcccagccagtattgcccgacatgtcccatgacacgattggcaaaggcgggaatagccatcggcgtatccagtaaaaagatatggtttgccgcatcgaccaccacattatttacctgccggttaatcgcagcgccatagaggaacatacaacctgccaccgctaaaaggccaagcgccatcgctctgggaatcgtacgatgcgcttttttaatttccggcgccattggcgtgaccagttcacaaccgacgaacataaacatcgccatgccaatataaccaaacagaccagaaagattactgacatcaagcggtgcgccaaaccacccggaatgatgagtgaccggggataacaggatcccgcataaaccgaagatggtcagggtagtccacataccgaatgtaagaaacacttccaccttgccaaatacttcaacaccaatggcattcagtaacccgaaaaccactaccatgccgacgccaaccatccaggtattgtgctgcatggccacgtgttcgctaacagactcaaagttcaccagcgccatgacgccagcgagaatcgtttctgccgtgccggcaaaaatgtgtacgatcaggtaagcgcaaagcgcaccggtgatagcgaaaaaacgccccatcccgcaggaaatatagtcgtagacggagccagtcgtgggaataagcgttgccgcttcggcaaaggtggtaatctgcgcttgcatcataataaatgccagtaataccgcaagagcaaaggtatctccccctgagccaaaaccactggtcacggtcaggatcaccgggcttgccataatcagcccgacggagctggcaagcgtcgtggggaaaccaataacgccacgttcaagatggctggcaagtctgtttttaaacatggtcaacctcttcactattattacaacaataaattaccgctccggaataacgcttatttatggcaggcaccgtatctaacaggtatcgtcctgaagagggataacggtaaataacgttgtgacgccgtccccgcatgcgctaatagcaagtggggagcgcgttattctccccagtgatgccaacgctactgacgaacaattaaaggattcaaccctgcttatggctttcaacttttgccagataatgttttacaaaacggggcgttaaaactttccatgccacttcggttccctgttcaacaaaccaactatcgcctggtgaaaaacgtatcggttcctgacccgcaacagtgagttccacttccccttccagcacggttgcgtgctcggtaaagggataaatcatagtgaaaccgccgcgggtcgatgaaaacagtccacaggtaaatacgtcctcaggtttaccgtaaatcatcgcaacggcgacctggggatcgccttctgttggcaacgcccccaacaggctgacactcccgattggctgtaattcaggaacaggttgattgagtttaaaagcgtgcattaatgttctcctggttaattccggcctttccagaaaccggctgtttgatgtatcagttttcccgcactgaccagcaatagacgtagactgtcgcgaccataaattgtcgcgtggggaatgctactcatcagacgataccgctcggaaccgccatttattccttcggccaggattttgcatacaatatgggaaggcgtgacgccaaatccggaataaccctgaacataaaaaacattattgtgctcacgaagcgtgccaatctgcggaaacagattcgcgctacaggccatcggtccgccccaggcaaaatcgattttaacgtctttcaaataaggaaagacctccgtcaacagagtgcggttccaggcagcaaaatcgtgcggggtatattcaagaaaccttgtggcgctgccaaacagcagacggttttcttttgtgagacggtagtaatttatcaccgggcggatatcactaaaagccccgcgcaagggactgatccgctcaacaagctcgctggagagaggttctgtagagacctgataagaataagtaaccagcgttttcttataaatttctggttccagattattgagaaaactatcacaggcccacagcaatttggccgcttttacgctgcccatcgcagtacgtacccgcacagttttaccgtaactgacctcaaccacaggtgaatattcgaatatcttcacccccagcgaattcgcagcctgagcggagcccagcaataaattcagcgagtggacatgccctccccccatatgcttgagaacaccgcagtagacgtcggaaccaataacctgctgcacgtctttaccggtatagagttcaatatcatcttccggcgtagcagctttgaattctttttcccattgttgcagcgtttttaactgccgctggttgtaggccagataaccatatccggggacaaaatcagcctcaatatggtatttacgaattcgctcccgaataatacctgcgccgaggttcgagattttaaacagcgtctccattcccgctgcgcctacatattttttaacggcttcgatgtcgtgacctataccggccatcacctgaccgccgtttcgcccggtgccgccatacccaagatggcgggcttccagaacgacaacattagtgatcccctgctccgccagttccagcgcggtattgatgcctgaaaagccaccgccaatgatcaccacatcggcatcaatatcgtcttgcagagcaggaaaatgcaacgggtattttttcgtcgcgccgtagtaattcaacgcatcgatttttgtattcatcgcgttaccttgtcatcacgcttgactaagaccgctatcacagcacggtaacgttttacaaaatatcgtccggaagaatgacgttctttggaacgatattcagttccaggcaagtatgttgagatggaaaaacgtacattcctgacctacaggcacttctgatgagcgacgtgacattacttgccgaagtaacgacttttttacgccaacgacacggacaatttattgcaggtgaacgtcaggccggaaacggcacgaacttctcggtcactaacccagccaccggcaaaatcatcgccgacgttgtgtcggcaacccctgcgcaggcagaagaggccatgcagagcgccagacgggcgtttgatgtctggcgtaaaatgccaacgttacaacgcggcgcattactgctgaaactggctgatactcttgccgctcatcgtgaagagttagctcaactggaaagcgtctgttcaggtaaaacgattacgctgtcgcgcggtcttgaactcgatcagtcagtggccttcctgcgttactttgccggttgggcaggaaaaataaccggtgaaacgctgaatgtctccctgccatcaatgggagaagagagatacacagcgtttacccaacgccaacccattggcgtggtcgtcggtattgtgccgtggaatttctcaattatgattgctatctggaagctggccgcagcgctggtatgtggctgcaccatcgtcattaaaccaagtgaatataccccgctgacactgctgcgagtcgctgaactggctaaagaggcaggtttccctgatggcgtaattaacgtggtaaacggtgctggcggtgagatagcgcaacagctgatcgcgcatccagattgcgccaaagtgagtttcaccgggtcagttgagacaggtgagaaagtccggcgttcggcaacatcgtcaggaaaacgcgttaccctcgaactgggagggaaaaatgcggcgctgtttctcaatgatctctcggcacaagccatggtcaacggtattcttgaagccggttatctgaatcaaggacagatttgtgctgccgcagagcgtttttatctgccccaggaaaaactggatacggtcatgacgctcctcaggcaacggttatcggagatcgtgcccggctcgcctttagatgaaaaaacggtgatgggcccgctggcgaatcaggttcagcttgaaaaagtgctgcatctgattcaacgcgcacgggaagaaggggatactattgtttacggcggtgaaactttacccggcggagggttctttttacagccgacagcggtaaaagtgcgtagtaaaaacagtacgctgatgcacgaggagacctttggccctgtctgtagctttatcggttatcagaatgaaaaagaggcgctttcgcatatcaacgcttcgccattcggccttgctgcaagtgtgtggtcggaaaatatgtctaaggcattacgctacgctgaagatattgatgctggcatggtgtgggtcaatatgcataccttcctcgatcccgcggtaccctttggagggatgaaaggatcgggtagtggtcgtgaatttggcagcgcgtttattgatgactataccgaacttaaatctgtcatggtccgttattaaccatcctgaaaatgatgcaggcagatcaaccataccgaaaggtggactgtctgcctgattatcaggttcgctcgctgcgtttttttgcttttgggataatgttaaacgcccggcccggcgttccttcctgcattactagcgccatctaccgttagagtaggctatctccagccttaacggttcagactcatcctgtaacatcgcttccaaagacaacgccagcgtctgatgatgggcatcttttacactgactttcagcatgttgatgctcggttcataacgtaaaatagcagcgcgaagctcacggcaaaaccagttgagaacccgtttgtcacccacattcacctcgtgccattccggcataccccgagtgagcagcggcggtaatgtctcgccacctggcacggcgcaagagttgaataaacacattaacttgcgtcgtaccaattcatgtgggcttatcccctcaaccaagagcctgtcgaatagcgcgaccggaatggttggcgtcatcatcatttccctatctggtccatcgccagatcccatactgacgttctggactcctgctgagcgccgtctgatttctcggcagtgatttgccattcgattttcgtgaagttcagcgacatcgtttccaccggcttaccgccggcgccgccgctaacactgagttgtgatatcagcacgtttgtcagggtataaacgataagcgaccgcattttgccgtcgtcattgcggcacaacgtcagcaccgcggttctaattagcctcccgctacagcagtactcattgagcacaggcgtggcgaggtcgacaaatttggtgagcgacatttcaccaacatgcgcgcgcccggaagtccgctcagtgaggctaacatcgttatttacctgcattgccacattgtggctataagacatgatctctatctgatcttcaaagccttcaacctggctttcgcctttgatattgtcgagctttaaaaaaatcgcatccatgatttatctccttgttgatcaggtggcagttcagcagccagacgaataccggcggccagcgcttgtgactcttattaaaagcgcaacgaccaaaaaacacagcgtgaaaagcgccaggtttgcagggattttgccgacgtttacccacgtctgatgaacgttattccgctggttgcaaagcaatagagggttttggcccgctgtggccaaatacaattgaggttatactgaacgctctctgccatattcaatcccttttatcgcaaagtatccctggtgccggtatcacagcgtcgttattcaaaaattgacatttcagaataataatcagctatatataaaaaacacatcaaaaagcaaatatcaacttaatttttacttatttaataaaaaaatccaaattgatttacatcaattaacacacacaaaaacattaaaaatcaaagggttaaatgaaaattaatcactatggaaattttatttttcttaatactcacattataaatgttatttgcttattatcctgtgaaaactaaaaaatgatttaaatcaaaaaacaaactattctcgttgattaacgttttgaccgaaataaaaaagattttatacgtcccgggatagtctccctttctgatggacaatatgcattaacgagcgggcaaacaggtaacttctgcccgggtaatccgttacccgactgatattaacattgtcatgaggtgatatcatttgcccggccagccataatcatccggaaccggcgctacgccacgaacatcaggacggagcattttttgtcgatcctcttcgtcatccacccagacactggctatctcttcacaggttgcaaaccatacgccatcatgccctttaatatgttcaatcaaacgtgacaacatcatcatatgatgcccatgaccgattatctgcggatgaagggccatcgcatataaaccgttttcctgatggtgataagcataggtaaaaatatccttccagcgtcgcagaacaccgtcagtatcgctcatcccctcctggttgccggtatacgccagtgcgggaaaatcatccagataccagctaacaggaatttccagaatcgcgctggccgggcctgcgatatttcccgtctcccaattcacctgccaacgttgaggatggtaaggcacaagatctctcgccatcaggctactgtcatagagaaaaccggcttcctccagaagatccagcgtattctcgctataatcccaatagggagaacggtatcccacagggcgtatgccgaaatgtcttttataacaggcgaacgccagatccataagtcggcgttctgtatcacgattcaccagcgtcggattttcatgatagtagccatggtgagcgatttcatgcccggcatcaaaaattgctttaatgatttccgggaaggtgtctacagtgtgtccgggaataaaaaaggtggttttgatattattttctttgaacaatttcagaagccttggtacgccaacttgagcaccaaactctcctcgtgacataaaggatggcgacggtcgattaaatccgcccagccataaagactgagcatctacatcaacaccaagattgaccgcaatccttttaccctcaggtaattttaaatatcccataacgacctccagctaatacatagaagggacacattctgttatttaatgtgtgatggccagatattatatatgcctgcttttctgcgtctgtccttgaacgttgttgctgcccccccaagtctattttcatatagaacatcgaggttaatttctcctgaaatgacatcctcttgattgacgtgcgcctctgcgataataccttgtggatttttccacacgacatcacaggggcttaaaattgaacttcgggcccagcagcctggcagtggcccgcccgggtttccgcccaggcaacagtgaacaagataaatttgattttcaatacaacgtgcgtggcaacaatgcctgactcgccaaaatccctgttcagtaaacgtagcggaaggcgttaaaattaactccgcaccctgttccgccagcgtcgcggcacactccggtatttctgcttcataacaaatattaaaacccacctttgcaaatggcagttgaaaaacagccattttatcgccttcctgagtataccaaccccgttcagccgggaagatatgcgtcttactgtgagcataatgttcgccatcgggtccccatatatgcgcaacattctcatagcgatctgctccagtctgctccagatgagagccagcaataatgaactgtcctctttctttcgcttcctgttgaaaaagctgcttataggcatccgtgaactgatcaattaaagtaaggtgtgaaatgggtctttcttgccattttttcaataatgtaaataactcaatggtaaatagctccgggaagataacgacatcagcaccctgacttttattaagaagtatccttacttttgttatgaaatcttcaaaagtgtttatttcggtaacaatatactgacaggctgaaacagtaaaattacgtgacatcgtgatatccccggcatgaaatttaaacttaaattaacgtatagcgcatggagaatattagggagcggacattacgacatcaggttattttttgtgaagctgcgcaaaatatatggggaaaagagtagaagcatttaacctttatttacataaaggggactttatcgatgatcgcagcgagacagagagtcgataaaaatccaggcgaaaaacaataacccttaccacaatattattttcagcatctgaaaataatcaggcaaactaaatgataacgcgctggtataaaaccaacgcgtatttttaccgataagggtaatgaagacggccacccgaaggtggccgttagaacccggtagcgcttcgcttatcaggccagtgaaaccgagacagctttagcggtgagacgccagcggctgttccgtcattggcgggtggtgcttttctggatctttaatcagtacccacaggatgatggcgccgataatatcgaacagactgagtgcaatgaagaacgggccgtaaccgataatagcgaccaatgcccccataaacaggttgaagcttaactgtcccatccatgccgcagatcctgccagaccggcaaccgtcgcgacctcatttttcttgaacaggtcagcgctcatggtaatcacgacggtagacagcgtctggtgcgcaaaaccgccaatactcatcaatgcaatggcgacatacgggttagtcgtaatgctgacaaaaccgatcgaaatcatcaaaacagcgccgatggtaaagctacaacgacgcgcattgatcgtggtcatgtgcatcttttccatgaagaacttcgccaggaaaccgcctgcaacgcagccaaagtccgccgccaggaacggcagccaggcaaacatggcgatctcttttaacggcagatgcatcacgttaatcagatacagcggcatccagaaactcagcgttccccatgccgggtcagccagaaaacgggtaatcgccaacgcccagaagttacgctttttaacgatctctttaacggccggttttttattatcgtcctggagatagctttcctggccgtcttcgatataacgcagctctttgtgggtgatccacgggtgtttatttggcgagttataaatcaggaaccaggtgatggcgaacagcacgccgatcccaccggtaatcacaaacgccatttcagtaccgatgccgctatcagcaaaggtcagcatcgcccagaccaccagcggcggcgccagcatcgcgccaatcgaagtaccgatattaaacagtccccccgcaataccgcgttctttcgtcgggaaccattcggcgctggctttaatcccggccggaatcgctgacgcttcggttagccccatcagaccacgcagaaatgccagacttatccagccgccggccagcgcgtgcgccatgttgatcagcgaccataacaaggcaaagataaagaagccgattttcagtccgatgacatccatcaaatagccggtgatcggctgcgcaatggtgtaacaaagctggaaggcgctcaccacccaggaatattgttgctcatcaaaatggagttctttcatcatcgctggcgccgcaacgctaagcgagctacgggacaggtagtttacgatggtccctacgcagaccaggccgataatccaccatcttaattttgtcatcttcatgataaagcctcgttaaaaaacattagctccgcgccgtctgacctgtagcgggaaaactgaaatcacaaaaattggttgaccaatcaatattttctcatccggaccggtcaaaatctggcggcaactcccgcccttaatattcttgaaataaatacatcaactcatttcaagttgaatggtgaatgcttttcacccagcaaaaattgacacagatcaaataaataaaattggcagaccgtgaatgatgatatttgtgatttggttagccaatttagacaataaggttgacatgagaaaaattttggttgaatttaggggtcagaacgggtttacaaagcacgtttcgatgttggctggcaatgggtcaaccacgaagacgttatcgcaagaagaggaaacgagatatgaaacaaacctggcgctggtacggacctaacgacccggtaacgctgtcagatgtacgccaggctggcgcaaccggcgtggtaacggcgttacaccatatcccgaatggagaaatttggtcgatagacgagatccagaaacgtaaagctatcgttgaagaggcgggtctggagtggtctgtggtagagagcgtacctatccacgaagatatcaaaacccacaccggtcagtacgatttatggatcaaaaactaccagcaaacgctgcgtaacctggcgcaatgcggtatctatacggtttgctataactttatgccggtgctggactggacacgtacggatctggaatacgtattgccggatggttcaaaagcgttgcgttttgaccagattgaattcgccgcgttcgaactgcatatcctgaagcgtccgggagcagaagccgactatacggcagaagaaattgctcaggcagagcgacgtttcgccaccatgagcgaggaagacaaagcacgtctgacccgcaacattattgccggtttacctggcgcggaagaaggctatacgctggatcagttccgtcaacacctggcgacgtataaagatatcgataaagcaaaactgcgtgaacattttgcctatttcctgaaagccattattccggttgccgacgaggttggcgtgcgtatggccgttcaccctgacgatccgccgcgccctattctcggcctgccgcgcattgtctctaccattgaagacatgcaatggatggtggaaaccgttaatagcatggcgaacggcttcaccatgtgtaccggatcttacggcgtgcgcgccgacaacgatctggttgatatgatcaaacagtttggtccgcgcatctactttacgcatctgcgctctacgctgcgcgaagagaatccgaagaccttccacgaggccgcccatttgcacggcgatgtggatatgtatgaagtcgttaaagcgattgtggaagaagagcaccgtcgtaaagccgaaggtagcgacgatctgatcccaatgcgcccggaccacggtcatcagatgctggacgatctgaagaagaaaacgaatccgggttattccgccattggccgtctgaaagggcttgcggaagtccgcggcgtcgaactggctatccagcgcgctttctttagcaaataaccttctttcgcatggcgcgacgcgtcatgcgatttcccctactcaatgcaatagcaacatgcctcgccccggagatcgcgggcgaagacgtcgaatgacaggagtttgcaatggaacagaatatcgccaccgcccaggtttccgtcgcccgcccaaactgggacaaatcacgtctggtatcccgtattgtgcatctgggctgcggggcgtttcaccgcgcgcaccaggcgctctttacccatcatttactggaaaagagcgacagcgactggggcatttgtgaagtgaacctgatgccgggtaacgacgcgcggctgatcgcgaacctgaaagcgcaaaatctgctgtacaccgttgcagaacgcggcgcagaaagcaccgaactgaaaattatcggttcaatgaaagaagcgctgcaccctgaattcgacggccatgcagggattctggcggcaatggcgcgcccggaaaccgccatcgtctccttaaccgtgaccgaaaaaggctactgcaccgaccccgccagcggcgagcttgatgtcaataacccgctgatccaaaacgatcttgcccatccacagcagcctaaatccgccattggctatattgtcgaagcgctaaacatgcgccgggagcaaggactgaaagcttttaccgtgttgtcatgcgataacgtacgcgagaatggtcacgtcgcgaaggctgccgtcctcggcctggcaaaagctcgcgatgccgccctcgccgcatggattgccgacaatgtgaccttcccctgcaccatggttgaccgcattgttccggcggcgaccgaagagacgctacaactggttgccgaccagttaggggtttatgatccttgcgctatcgcctgcgaacccttccgccagtgggtcatcgaagataactttgtgaatggtcgcccggactgggacaccgtcggcgcgcaattcgttgcagatgtcgtaccgtttgaaatgatgaagctgcgtatgcttaacggcagtcactctttcctcgcctatctgggttatctcggcgggtatgacactatcgccgataccatgaccaacccggcttaccgtcgcgcggcgctggcgctgatgcttgatgaacaagcgccgacgttatcaatgccggaaggcaccgatctggaagggtatgcgaatttgttgatcgcgcgtttcactaacccctcgttgaaacaccgcacctggcagatcgcgatggatggcagtcagaaactgccgcagcgtttgttggacccggtacgtctgcacttgcaacagggcgatgactatcgccgcctgacgctgggcgtcgccggatggatgcgttacgtcggcggtatcgatgaacaaggtaaaaccattgatgtcgtcgatccgctgctcgcgcagtatcaggcgattcatcagcaatatcagacgccggaagaacgcgttcgcgggctactggccatcgagtctatctttggcagcgacctgccgaagaaccacgaatttgtgcaagccgttaccgacgcttaccaacagctattgcagaacggcgcgaaagccacggtagaagcgctggctaagtaaggagataaatcatggctacgtttatgactgaagattttctacttaaaaacgacattgcccgcacgctgtaccataaatacgccgcgcccatgccgatttatgacttccactgccatttaagtccgcaggaaatcgccgacgatcgccgtttcgataacctcggtcagatctggctggaaggcgaccactataaatggcgagcgctacgaagcgcaggcgtggatgagtcgctgatcaccggcaaagagaccagcgattatgaaaaatatatggcctgggccaataccgtaccaaaaacgctgggcaatccgctgtatcactggacgcaccttgaactacgccgtccatttggcattacaggtacgctgttcggaccggataccgcggaaagtatctggacgcagtgtaatgagaaactggcgacgccggccttttccgcgcgcggtattatgcagcagatgaatgtgcggatggtcggaaccaccgacgacccgatagattctctggaatatcaccgccagatagccgccgacgacagcattgatattgaagtcgcgccaagctggcgccccgacaaagttttcaaaatcgaactggacggctttgtcgattacctgaggaaactggaagcggcggcagatgtcagcattacccgtttcgacgatttacgtcaggcgctcactcgccgcctcgaccatttcgccgcctgcggctgccgcgcgtcggatcatggcattgaaacgctgcgatttgcgccggtgcccgacgacgcgcagcttgacgccattctgggcaaacgtctggctggcgaaacgctgagcgaacttgagatcgcccagtttaccacggcggtgctggtctggctgggccgtcagtacgccgcgcgcggctgggtgatgcagctacatattggcgcgatccgtaataataatacccggatgttccgcctgctggggccggataccggctttgactccattggcgataataacattagctgggcgctctcccgtttgctcgacagtatggatgtgaccaatgaactgcccaagactatcctctattgcctgaacccacgtgataacgaagtcctggcgaccatgatcggtaacttccaggggccgggaattgccggaaaagtgcagtttggttccggctggtggtttaacgatcagaaagacggtatgctgcgccaactggagcaactgtcgcaaatgggactgttaagtcagtttgtcgggatgctgaccgactcccgcagtttcctttcttatacgcgacatgaatatttccgtcgtattctctgtaacctgctgggacagtgggcgcaggacggagagattcctgatgatgaagcgatgctaagccgtatggttcaggatatctgcttcaataatgcccagcgttatttcacgattaaataatcgctattaatctgtgagcacaggtctcaggtatttcgaggggcaggaaggcggtaagagagtgagaaatttagcagtaacgcacttttccagccaaagtctggccgccgataaaaagcaaagatgtcgctgattaatcccgaatcacttactaaggtaagtgattcgggtgaacaaacacagccatcttctgcgtcatgcttcttttctctgtccggaataactccagtgcagaaagtgcgatacatcagtcctgttgatgatggctcctgttggttatacggtaataactcatgacttcacagtgtggtttcttttaacaaatcgacagccagcatttccagctggttaaccacctcattactggatcgctccattctgtcgagttcttgcgacatcgcattcatatcgcctgcggcaaaatagttcagcgcagagtggccagcggtatgcacctctttatgaggcgcttccagactacggaaactgtagtaattgctaaactgctgtccttcaaaaccgtagtaccatttccccagccgacactgatcgtgcatcgttattttactgtttatgtctttatttaagagtaatttgtagacttccattttccagataacatggtcaactttgacaatattcaaaaactgcaccgtagagatgtactgcatgaccgatttcatgctcagcgatttatcgatgacgatgccaatagactccacaatttgatttatgttagtcgtaatattatcaataaccggctgttggttatccagtacctcactcactctggccgtattatctttgattacagaggttaacgtactgacgcttttcgaactgtgtttaacatcttcggacaggtttttcacctctttcgaaataacgctaaaaccacgcccggcatcccctacgcgcgcggcctcgatcgcggagttaatcgctatcaaattggtctggttagcgatcttctgtatctctttaatacacgcattaatttgcgttaaggaggtatttaagtcgcccatacgacagccaatatccgatgaagtcgtgccaatttcggtgataaattccacgagcgattttaatgaacttctggctttatcattctgttcgttaagttcattaatgcgttctttttcaatgttgagctgctcacaggacttaatgatggcattacgaatgatatcgatcgtcgagatccccatcagaattttttgacacagtatccgctcataaggctcaggagtatccaccaccacgtcagatgcattagcgccagattctgctggcggcggtatttttacaacattattattccagtggcgcaagcctaatacttttttaaacatataccattctccttattatatgtggacatcctgatctatgcctggataaagtattatcaactcatgctaacataatgaaaaatcggctgtcatctgccataaccatacgttcaccagaataagacaaaacgtccactaaacttaaataattacagagtaaactattcaataataccattaatagtcataatggaagtcgcttcgctttatacggaaatattatttacaaggctgacaacaatagctgaataataattaactgcatttacttaggtgtagctatatctcgccacgaagattgcagacagggtttaaacgcaaacttttgcaatagaaaaataacctaacgtaaactttttatatgaccaataatatcatttggactcatcaatatattatgctgtccgtttaccagccaaacaggcatgacctaaatccaaaggaatgggggcagcgtaaccagccgcaaaaagtatcgagtagtcgaaaatcaggaaacggatgcgccaacgcggcgagcgtcaccgcctgcgtcagaaaagttaagaataatttgtgatattatttctcatatgttaccagtaaatggcaggctgatagccgttcgctggtaaacacaacaggcgggatatcggcacccacgccgatatcccgacgagaatgaccccgttacgctttgatgacgattaacggttcaatatcgctctcttttttaatgactaatgaatcatcgccgcgcaggcacgtaccgccgtagttaccgcccacggtaaacgtacagacctgaatatacttcccggcgaccttcggcaggcaccacaactgctgatagatatttttctgcgtggcgaacttgccgctggttttatccaggagctcttcctgatggctcaccaaatcaatattactaccgcaacgtccggcaatcggttttaccgcatagccggtctgcaccagctcatcgttaacggtaaaatccgtgtcgagcaaatagcgatgatgcgggaagagcgaccacaggatgggcaggatcgctttgttacccgggatcaccgtccacagcggttcaaacaccaacacttccgggcgcagtaatacatcaatcagccggacttcattttccgggtgcccggtacgaataggcactgcggcatactccgtctcgctgacttcgcgtatctgctccatcgccgtttcccacgcccaggttttccagacacaattcaccagccgtccgtcgccatcgatcaactgcccggcgtcatcccagcgcaactcgcccagaccgcggagaattttgctcgcgaaaccggcctgatgcagcgcctgctgcataaactgcgcgtgatagtcctcctcgatatcatcatcctgcatgatatggacgaaaggacgcgctttactgtgtttccaggcgcctgccagctcgttaattaagccctccgccgggttatgccctttaccggtatagccctgctcagcccatttttcgagaattaatcccgcttcggtatggcatgatgcggaatcggcattgtattcatagactttcagcccgcgttcatccatgcagaaatccatacgaccggtgatcatatggtgacgacggcgctgccaggagagacgcaggcgcggccaaagaattttggggatatcgaatagcgccagcagattatcgtcttttaaaactttgtccgtggcgtgcaggtacatcaaatgcaactcattggtcgctttgataagctcctgttcagcgctctcggtgatggtaaaatactggtacgggtcctgattgataacgtgtccgttcgcctgtacataggctttttgtaacggatcgcgctcatccagccacggaccgtcaaactgacctttctctggcagtcttgcgccgcgaatcgccagcgactgattcgcgatgtcaggctgtgacaaactgtattgcgtgtcgtcggtctggatcatccagcctaaaatcgtcgtgtcatcaaaggtgtcgcgcagggtgtaacacccgttttctacgaccatttccagttcgcgagtccactgctgccctggcggcaatggcgtgtggataacgttttgctcagcaatacgaattttgttatccaggagttgggtgataatcgcaacgtgcccggtttcgttaaactcgccgcccttttgccagatgagcaacgccccggcctccggcgcgcgcggcgaaccgttcgggaaggcctgcaaaggcaaaatattgtcattcacgacctcgcgcagaaaacgcagcgagaaaatttcccaggccatgccgacgtcagtaaaaacaacgccataattcagaaagagaaaacggcgggcaaattccacgcactgccatttatgccccatgtattcatcgtcgatgtagctacgaaaagctgcgtcgtcgtcgtcccacggatcgagggaattgtaatctgaagagtagatcgctacgccgccgggggcgtaacccaataatgtcccgaagggggcatcctgactggtggttcctttgctcatgcacttacctcaaaacaagaccgcctgagcagcctggcgtgatttcgctctgattgtctgctctgtgacactaaccggacagaggtcgacataatcatacacctcaataaggcacactgaggccagaaggttaaaatttcactcgccggaatgtcccaatcggttaaatgtccgactagcaagctgctacactgcttcaacaccaccactgtgaaggcaggtcaatatggcagataatacttatcaacccgcaaaagtctggacgtgggataaatccggcggcggcgcgttcgctaacattaatcgcccggtttccggcccgacgcacgacaaaacgctgcccgtcggcaaacatccgttacagctttattcgctggggacgcctaacggccagaaagtgactattatgctggaagagctcctggcgctgggcgtgaccggcgccgaatatgacgcctggttgattcgcatcggcgagggcgatcagttctccagcggctttgttgacatcaatccgaactcaaaaatcccggcgctgcgcgataactcacacaacccgccgattcgagtttttgagtcgggcgcaattcttgtttatctggcggataagtttggccatttcctgccgcaggatctggctaagcgcacagaaacccttaactggttgttctggctacagggcgcggcgccgttcctcggtggcggtttcggtcatttctatcattatgcgccggtaaaaattgagtacgccattaatcgcttcaccatggaagccaagcgtctgctggacgtgctggataagcagttagctcaccacccgtatgtcgcgggagaagagtacactattgccgatatggccatctggccgtggttcggcaacgtggtgctggggaatgtctatgatgcagcggagtttctggatgccggaagttatcaaaacgtacaacgctgggcgaagcaggtagccgaacgtccggcggtaaagcgggggcgcattgtcaaccggaccaacggcccattgaacgaacagcttcacgaacgccatgacgccagcgacttcgaaaacaataccgaagataaacgtcaaagttaaaccatgatgccggatgaggtagtaatgtcgtcatccggcatggtattccctgctgacgcttcgcttatcagttctgcgagtgtgtcatattcggcgcttcactaaacccatgttgcatgagaatcaacctcgcccgtgctgacagtaaaaagtcggcaagcgtttttccctgctcgctcaggcaggcaaagccatattcagccacgggattataaggttccgggatatcaaccactcgcagcgaattaacctgccgtagcctgggagcatagctggcatagccgataaagatatcggtgtaatcatgattgatgagccattccgcagccagccggcccgccggtaacggcaaagtctgcctgccgccaaccagcgctaccgcgcgttttcggaccgcttcgccctccttgcccatccgcgaaaaaagctgctgcgtataatcgccggaaggatcgcaacctgctgttgaggtgccgatccgcagatcccgccgggttaatagcgacagccagtcctcgccttcacgcatcgcctgtgcccgcacgctcaggcacaaacggttcgtcgtaaaaggcgcgacccgcagcgcccgcccgctttccagcagcgcctgcggatgcgccaggttcgccgaagcaaaaaagtcgcacgcttcgcccgcttcgatgcgttcacgtaacagccccgccggaccgaaatcacataccgcatccgcctgaaatgccgccattagctgcggccagacgacgcgcaagctccccgcagccagtattcgcatcactgtacgccctgatagtcagtacggtaaaaacgttgataccagtcgttagcggccttttgcatgtcaatatcgtggaatttttccggatagagttttttcgccatccacagttcgccgattcccaccgcctccggcatcggatatccccaggctttggcataatccggcatcaggtaaacccgatgatgcttcaccgcgtcaatgacctgccactggggattgtgcaggatctcattgacgacctttggatagcgattctggacaaagattacctgtggatcccaggcgatcacctgctccattgtcacctgcttaaagcctttcaccgaggatgccgctacattcagcgcccccgcatgggccatcatcagaccggtgtatttaccggaaccgtaggtggtcagctccggattcgccatataagcgcgaacccgctcattttcaggaaccgactgcaaacggtcgctgaccatcttgcgacctttatccatcgcctcaatcagcgctttcgcctcctgcggtttattgacgatatcgccaatcagcgttattccttcacgcagcccgcgattataagcctgctcttcatcggccagggtcgggttcattttagcccgctcgccagcaacatcatggcgcagcgaaatcgccaccaccggaatgccaagacggctgattttgtcgatcatctcctgcggagcgtaattcgtgacaaacaccacctgcgggcgcagcgccaccagtttttcaggatcaacgtgcgttagatcgcccagcgaggctttttgcgccagttccggcgccagacgcgcatagccgtcgcctaattgctgtttccagttcgccatgaccccaacgattttgtcagtggcattcatctgtacaaggagattgagcgtttgatgctggagcaccaccactctgtcgacggtgtcgggaaccgtgacctggcggccaagttgatcggtaaaagtacgcgccgcctgtgacattaacggccagcaaaaaagcaacgccagcagagagagctggcgcaaaaatttattcataggtttcgccccacaatcgatatataaataattatacagcgattatagagcgatataatagaggtgattaagggatcacgcgctggtgatgtcgtactccatgcggcgcagcgcatctaacgtggctttcgcttcgtcttcgtcaatgatgctcatcgcaaaaccaacgtgtaccaatacccattgccctaccagatcggctggcttaccttcacaaatcagagcaatattgacatcacgtttgatgccacacacttccacctgcgcaagctggtgaatatcatctccgacggccagcacctgaccggggacgccaatacacataattaaccacctgaaataaaatgcgggttattcgacctcaatactctttactttcaacgaatcgccggtatccacccgcaggcgatcgccatgacaacgcggacattgcgcgtcatgcctgagaatttccaccacctgactgcaatcccagcaccaggcctgggccggtctgtagtcgatgtgcaattcgcacccttgcgctaaagttccctggcaggcgatgtcaaagctgaaacgaaccgcgcgctcttcaacgcacgaaagcgcgcctatctccagccatacgccggtgacgcgcgccacgccgtgctgttctgcctgctgctgaataatttcaacggcgctttggcaaagagacagctcatgcattctcacagctccgacggccaaacagcaacgcacgccggcttgtctgcggcgcatcaggattgcttaccggcagggataacagcatccgcgcgcagtcatccgccagccggacgccctcttccggcgacaggctacgggaaagcggcgacatcaacgagcaggcaagatattgtgaaacgccttccagttcgccaacggtaaaggtcatcgtgccataaggcagttgcagaccgagtttttcaccgatggtacgcccgggccagatctggtccgggccagggaagattaatgcgcttaacatccacggcgtaattaccgtgcccgtccattgtccttcaaacaacgtaaaatcagagacatgcaccggcatagtcggatgcagaaacgaaagatcgtgcatcgaacgatgggctatctcttcaaacgccgcctgaacccgggcgacgggcgccgtgtcgaatccggaaaacgtttcagacatgcgccgtctccttaggaattgcttcgacgccggattctcgcagcgcagcaagaacctgctcaagcgcaggttcaatcatcgcctcgacggttggcgttaagccgatgtgcggttccagcgactgtggaataacgccgaccagggtcagtttcttcggaaactcgccggtaaagcggagggccgacaatacgtcggccagtccaagctgatggggggagattttgttggtgaacagcgccggaacttcatcgtcgcgcagtaccataatggttcccggcgcgttctttttcgacacgatggcgtcggcaatgatcaaatgatcccgactcgccatatcgccaagaagttccattcccgccgtaccaccatccagaatctcaacgaaatccggcagggtgtatcgttgctctaacgcttcaacaatacgcaccccgatggcttcatcggtcagcaaaatattgccgacccctaagactaatatccgcattacaaaaccttcaccgagaccacttcattgccatcggcgtccaccacgtgtaccgcgcacgccatgcaagggtcgaaggagtggatggtacgtaccacttccagcggcttcgccggatcggcgatcggcgtaccgaccagcgactgttcgtacggccccacgtcatcgttgaagttacgcggacctgagttccaggtcgatggcaccaccgcctgatagttactgataataccgtctttaatcaccatccagtgagacagcataccgcgcggcgcctccaggaagcccacgcctttgaactcgcccgtcgccggaatgttcggcttcacaaacgtggtgtaatcgcctttgccgatatttacaatcagcgcgttgtattgatcctgcaatatgttttgcagttcacaacagtgaacggtacgcccgatgatacgacccagcgtagagtgaagttgcgccatttccaacgttttgccggtcagcttctgataaagcgcaatgatttcattgagcttggtctgcgtggattcacgacctgcagccagtttacacagcatgttcgccagcggcccgacttcgacggttttgccgtagaatgtcggcgacttgacccatgagtatttaccgtcatccgaccaaccgtcgtaagccgggatcgtagtgccttcccacggcgcctgcggcgcttcatctttgtaccaggcgtgcttcgcgctctcctgaatacctttaatcaggaattcgtcggagtgagaggtgatcggacggtatgtcgacagatcggcattggtaatgtaaccgcccgggaacaggaaactgccgtttttaccgtcggtcgggaattccggcgcgctcaggtagttcaccgcgcctttgccgcgctccagccattccggatagtaggccgcgatgactgcggtatccactttatacacctgctcgacaaaatcgctcagcttatcgataaacgatttgatgtacatcaggcgttcaaggttcaacgtaccgatgctgtcgagattgatcgggttcgccaccccaccgaccgccaggttctggatatgcggcgatttaccgcccagcaacgccaccacgcggttagcgtcacgctgacattccagcgcctgcagatagtgggcgaccgcaatcaggttgacctccggcggtaactgcattgccgggtgcccccagtagccattggcgaaaatacctagctgaccgctggcgacaagatccttgatcttgttctgaactttcgtgaactcttgcgcgctgttcaggtgccagctcgacacgccatccagcatcgcggaggctttttccggatcggctttcagcgcagaggtaatgtccacccagtccagcgcagagagctggtagaaatggacaatgtggtcatgggtggtatgcgccgccagaataatattacggatatactgcgcgttgacgggaacatcaatattcagcgcgctttccgccgcacgaacggaggagatcgcgtgagttgtcgtacaaacgccgcaaatacgttgcacaatcatccacgcatcgcgcggatcgcggttcttcacgatctcttccataccgcgccacatggtgccggacgcccatgctttggatacgacgccgttctcaatttcgcagtcaatgcgtaaatgaccctcaatacgggttaccggatcaatagtaattctctggctcatgctttgctcgcctcatgacgattatgatcgttttgttttaaaggaggaagtatcggcagtagacgaatgagtacgatgtatgcacaaatctcaatagccacaaaaccaatagaaatcaacaattcttcccaagttgggaagtagtggtagccgccacccgggttgaatgccaccagcgaataggtcagacgccacgtcgcgcagcccaacagcgcgctcagcgccgacaggtacagcatacgagagtcattacgcagtttcgccacacgcagcaccactaacgggaagaccatcaggacgacttcaatccagaacatagcggagtaaaaatcgccggcaaacgcataggacagcttgtcgcgataaatcagttcgccaaagcgcaggacgacgaaaatcgccagcagcacgctgatggtattcgtcagcttaacaaacaaatttttctcatccggaccgtttcctttcaggcctgcctgaaccagcgaaccctcaaatatgacaatggagaagcccatgataaacgcggtcagaaccgagaacagcggcagcatttcatagctttgccatagcggatgcactttatagcccgccgagatcatcaatgaccccattgaggactggtgcatcgtcggcaacagcgcgcccagcgcgataataaagaacatcaccttattcagacgcttgagcgacactttccagcccagacgttcaaacaaggcaggcgcaaactccagcgccatcacgccgatgtagatggtcatacagaccgccgtctcaaacagtaccgagttcacgttgaagtgacctggaatgtagaagtacggcaggttccagtaacgaccgacgtcgatagtgatcgacaggccgcccagcgagtaaccaaacaagcttgccagcaacgccgggcgcaccaacggatggtattgcccacggttaaagacatataccgcccatgccaacgcccaaccgccgcaggcaaagccagtgccgatcaacaggtcaaaggcaatccagacgccccatgggaaaccgccgttcaggtcggaaacggagcccaacccgaagaccagacgcttcacgataaggagcatacacaggacgattaacggtccaaaaataatgaccggtttactgatgatttttccgcccagcggttttggatcatgactcatgatcgtctcctccatcgtgatggtcgtttttgctattacgacgaaccagcacggttaagcccgccagcgcagccaggggtagtatcatgcctttataaagcgtgtgttgaacatgctcggagcgcgctccggttgaaaggtcatccagcttcggcagatccagatcttcataaggaacgcctgtcagcaccagcacctgagtaccaccgccctctttttcaccgtagaggtgtgggtagtatttaggcaccgtatgcagataggtgtcgtccgttttcaacgtctggcgcggatagtgatattcactgcctggtttgagggccagacgttttttcgcttccgccatcagctcttcacgagtaccgaaaatgacggcccctgccggacaaacttccacacacccaggcaaaccgcctttatccagacgctcaacgcctttctggttacacaactcacacttgtgaagcgcgccaaacgggttgttgtagtcgtacttaggtacgttgtacggacaggcgaccatacagtaacggcagccggtgcagacatctttgtcatagtggacgatgccggttttcggatcttttttcagcgccgacaccgggcaaacggaaacgcagttaggatcaacgcagtgcatacactgtttcttgatgtaggcatagccgttctcttcctgatctttgttcacgcccgtgccgctacgccatacctgaataatgttattggtatacggcgacagcttgtcgttgttcgaccaggtctgctccccttccgggttacgcgccgggaagttgatatcctgacactttgtgacgcaggcctgacagcccacgcacagagtggagtcatacagcatacccagcgaacctggaatcggcggacggttttctgcagccgcatggctgacagacggcgcggcgcccaacagcaatgctccaccggaggctgctttaataaagtcacgtctgttcacggttattctccccgtgagtcagcgttatctttcttttgctgacgccccagttcacgtaccgccatcacgctgacgccggcaaccagaccgactacgccgccaagcagaccgacagcgcccgcagagatattgccgccttctttcatattgacgtcaggtttctctgaacgcggagtttggttttcgacatgagcaagctggtgaatgcccttatggaagccgataccttcttcgttacagccatagcaaggatgaccgatcgccactggccagacgccgccaacgtcacagaactgtaacgtagaacagttgccccaggtttccggccctttacagccaagatggtagagacaccagccctgacggtggccttcgtcgccaaattctttggcaaaacggcctgcgtcgaagtgtggacgacgttcgcaatgctcatgaatcagacggccataggcaaaggttggacgatttttcgcatccagcttcggcggcgtgccgtaagtgatgatatgcgcgacggtcgccaggaagttatgcgggtttggcggacaacctggaatattgataaccgttttgcccggtaagacttcctgcagactgacagcgccggttgggtttacgccagccgcagcaacgccgccccatgccgagcaggaaccgatagcgataatcgcggctgcgccgtcagcggctttgcggatgtgatccacgatcggctcgccggcaaccatgcagtagataccgttatcttttagtgggatagaaccatccaccaccagaacatattgccctttatacttctccagagcgttatgtttgttttcttcgacctggtgaccgaatgcggcggaaagtacctcgtggtattccagagagatagtctccagaacgaggttttcaacggttgggtgtgtagcacgaagcagtgattcggtacaaccggtacactcctgagcgccaatccagataacgggcggacgctgtggattggataccgattctgccatttctgcggcggctttgctactgagccccatagtagcggccagtgctgcacaaagcttcatgaaatcacgacggttaatgccgtgagaagtgatgagagtattatctccagtcattttatagttattccgttacgaagacctggcttttattttgcactgttcgcgaagaagttattgcgatcggtacgccatttaccacactttttttatggttatgtgcgccataatacttcgacggaacagtaaaacgaagggaagaggcgatagtgtaattaattaaagcaagataatacccctgttggatcaaccttcgagtcgataaccgaccataaagaagcgaaccgccatcccggaatgattctctttaaagaaatccatcaccatttctttatccagaccatagcgacgcgtcagaattccggcctcccacgcgctaagttgacgatcgccggtcttttcgaacatacggtgtgtaaaacccaatacaaagccacgtttatactcagaacagaaattcaccgcatgatgcgcgctatatgcatatggcgcgtgcaacccagccattaaccctttcccaaaatgattattcatctgacctccttagtcgctatataataaattatatagcgactgattaaatgaaggccagcgcattacgcgcttttttgcttcacatcagaaggaaacccattcatcagtagactgtgcgggagccgacgccattctctgaacgccaggcgccgctttcgccgttacgcgttgttgcggctcactagcggaaagccggaactgctgtacggagcgttgcaaatcctccgtctgccgttccagcgccgccgccgccgcggaaacctgctcaaccagcgcggcgttttgttgcgtaacgctatccatttgcgtgatcgccacgccaacctgagaaatacctttactctgttcttcggaggcggacgcgatctgtttcataatcgtcgtcacttccgtgacgccgcgcaggatggcgtccatcgtcgcgccggtctcctggaccaactgcgcgccctgcgctacgcgacgtaccgattcgccaattaaggcttcaatttctttcgccgcccccgcgctgcggctggccaggttacgtacctcaccggcgaccaccgcgaagccgcgtccctgctcgcccgctctggccgcttctaccgctgcgttcaaggccagaatattggtctggaaagcaatactattaattacggtagtaatttccgcgatctgctgcgaactggcggaaataccgttcattgtttctaccacatcggaaaccagttcaccgccttttcctgccgttagcgaggcggcatccgcaagctgactcgcctggcgagcgtgttcggcgttcattttcaccgttgcggtaagctgttccatgctggcggcagtttcttccagcgcggcggcctgttcttccgttcgggaagagagatcgttattaccggtagaaatttccgtcgcgccgcgccagatattgtcgcttccggcgcggatcgtactcacggcttcgcgtaaactgtcctgcatcgcgcgcagtagcggcaccaaccggcctacgcagttacgccccaacgcttcaatcggctggctaagatcgccttgcgcgatacgctgaaactgctgacggatacgctccagcggtttcaccatcattgcaaccagatagcgatcggtaaaaatcaggatagcaatgcccagaatcaccgccgtgataagcaggatgcggatggtataggttttaccatcgaccatcacacgggtgttatccagcatggcgccagcttcatgactaaaccgttccgcgctggcgccgaacgcgcgactgagtgcgggcgtgaccgtactggcatgttcgctccaggcggttagcgatccttgctgcaccagttgcatttgaggaacgacgcctttctccagcaaggcctgccagttggacaagacctcccttgagatatcagggttcatcggccctggcgatagcgctttcatctcctccagcttctgacgcatattctcgagcgactgccgggcgggcgcaaaatcgggcgtgccgccgccgatttttacatccatcgcgcggctaaggcgggtaacaaagcggaaatattgatcgttaccctggcttagcaccgtcatttgccgcacaagatgccggtcaatatcatttccttccgaaacttcggataaagcatggacgctgtataaccccacccccgaccagagtagacaaaaaagtcccagtatcgtcagcatgaccatacgaatagtaaagttttgcagcaaacgcatatgaatttccttgctgaatataagagattagtcatctgatgatgacgcactctcgttatcggcaaggcgcggagaatatataatgcattctccatttttttacagttatcgccgtttacgtacccgcagatgttatatatctgtgaacacagagaaaatcttttagtcttattactgagtaaatgaatagatgtagtaaaaatattgcgtaaggctgcagggagacggttatccgccgttaaagaagcgctgttttacagccgggctcagcgtcctttgcccgactgccccgccgttgacggcggctcaatggttatgccgcgtcaatctgtccagatagcccataacgaatgccgacaggacaaaggtcagatggatgatgacataccacattaatttgttatccgggacgtttttcgcgtccataaacacgcgtaacaggtgaatggaagagatagcgactatcgatgccgccaccttattttttagcgacgtcgcatccattttccccagccagttcagcttctccttgcccgcagagatatccagctgagagacaaaattctcatacccggagaacatgaccatcaccagcaatccgccgaccagcgtcatatcaaccagcgataacagcaccagaatcagatcggcctccgccagggcaaaaacgttcggcagaacgtgtagaatttcctggaaaaattttagcgctaaagcgatcagcgccaaagagaggccaaaatacaccggcgcgagcagccagcgagacgcatacattacattttcaagaaagcgttccatagggacctgtcaggtaactaaaaccagcaacagtatatctcaaccatgcaacatcagatcaacatgccagttaagagcctatcccaccaggcgttattggcgcagccagtttggacacggacagcgcgcaaaaaccggagcgtacacgtagtacgtgaggtttgactcgctacgctcgcccttcgggccgccgctagcggcgttcaaaacgctaacgcgttttggcgagcactgcccaggtccaaaatggcaagtaaaatagccctaatgggataggctctaaatctcatccgggttaacctgcgggcgctgatattccggccataccagcgcgaccaatgccgggtaggcttcaagactgaactcgcgaaaacactggcgtaaattaaggacgtccaaatccgaatacggcaccttttctccgttcagacaacgcttcttaatattgtcgtaatacttataaacggcagagttaaggtcgctgcaacgacgctgtgcgtcaaataatccaggcgtttcattcaactcagtcattgtcattcgttttatcgttgcatgaaggaaatcgatatattcatggttaacgcgccagtaccataccggcgttatcgaattcattaatactgagaaatgatcttcgccctcttcctttgtcatgggttcagtttgatttaaatttacgatttttccaccaggacgttttttattaacctcccacatcaggaagagtatcgcgccggtcagtaatagcaatataataacagaataaaaaatactgttcatagcaggctccattttttttgattttaaaattacgccatgttattgtcaacgaaacctacactattaaaaatagtataccactgatcgtaaaggatatttagtcatgcttcctgagcatctggtttcctctcattttcgcctgtcatcgccgccccctgaagccacagaaaacagtaaaaatttgcctcagggaaagacaaaactcagcgattacgagcccgatattttaatttgcgctaacgcaaccgggcaacacagaaacgtattatttgaagaacgcgaccgtcatattaaagaacgtctgtattgtgtggctaaaattgaaacgtttgcccgcctgataaacgcactacaggcagaaggcaatattgatgcccaaacactaagtaaaatactggcggataaaaccgcaatgataaatgaaaaaggtaatgccatttggcttaatttaatcactcgcgaaaccaatatgccgctattttattcactggaagataaagatgaaagaagttgaagacaataacgtttatttggctttagacaaccataaaagtgatgaatttatcttaaagcaaaatcttgcagcgctaatcgccagtaaaaatgccaccctggaaaaggtaacgcaggaggtggtatccataccggcggcgttagtgcgcctgaagtggcaaaaccgacgagagatgtatacgttacaggtcaaagaggagatttatggcgcgaccatcaatgctattatcgagcagcatcctgaattacgagacaaaattatgtctcgtcttgaaagtgactggcagcatctgctggctcgcgagacggcaaccttacgtctgacgcgtaagctttccgatggcgactaccggacgcgcaacgtcaccaccgtcgcacggcaagaaaaataaccttcatggctagttaactctgttgtgaatacgggcgaagcataaggatcgttctgattctccctcttacggtagtaaaagtgtctacgcttaaagggtgttcaacctgaagggagaagctcaatgtctcatctatacgaccctaccacgcagtattacaccggcgaatatcctaagcaaaaacagccggcgcccggcgtccaggcgaaaatgacgcctgttcctgactgtggcgaaaaaagttatgtcggcagtggtcgccttaaagatcgtaaggcgctggtgacagggggcgactccgggattgggcgcgctgccgctatcgcttacgcgcgtgaaggcgcagatgtcgcgatcaactatctgccagcggaagaagaggacgcccagcaggttaaagcgctgattgaggagtgcggtcgtaaagcggtgttattgccaggcgatcttagcgacgaatccttcgcccgttcgctggtccataaggcgcgtgaagcgctgggcgggctggacattctggcgctggtagccggtaaacagacggcaatcccggagataaaagatctgaccagcgagcaatttcagcaaaccttcgccgttaacgtttttgccctgttctggataacccaggaagcgattccgctgctgccaaaaggcgccagtattatcacgacgtcgtctatccaggcgtatcagcccagtccgcacctgctggattatgcggcaaccaaggcggcaatcctcaattacagccgtggcctggcgaaacaggtggcggaaaaaggaattcgtgtgaatattgtcgcgcctggccctatctggacagcgctgcaaatttccggcggtcaaacccaggataaaattccgcagtttggtcagcagacgccaatgaagcgggccggccaaccggcagagctggcgccggtgtatgtctatctggcaagccaggaatccagttacgttaccgcagaagtgcacggcgtgtgcggcggggagcatttaggctaacgcatgaagtcgattaaggtggcgcaattctgttaagcaaggcaccatcttaggcaataaaaaagccgggtggcgacttcgccttacccggcctacagcgtcagcagaatacttatttcgctttcgcggtctcttcgccgaccagaccaatcttgagatagcccgcctgatgcagcatatccatcactttcatcagggtttcatactctacggttttatccgcacggaagaaaatcgtagtatcctttttcccttccgtcagggccgttagctcggcaatcatcgtatcatccgtcaccggatcgttaccgataaacatggtgttatccgctttcaccgacagataaaccggtttttccggacgcggctgtggcgtactggtagaagcgggcagattcaccttgacgtccaccgtcgccagcggcgcagccaccataaagataatcagcagaaccaacatgacatcgataaacggcgtcacgttgatttcatgcatttcgccgttgtcatccaggttctcgttaagacgcattgccatgacgcattaccctacccgtaatttctgcgcggcgcgtaccggctgcgcactggcgctcgcattcagatcaagatcgcggctttgcagcagcaatacctgcgccgccacgtcacccagcgtcgctttgtaactgcctatctgacgtgcgaagatgttgtaaatgacgaccgccgggatcgcggctaccagcccaatcgccgtcgccagcagcgcttccgcaataccaggagcgaccaccgccaggttggtggtctgcgtttgcgcaataccgatgaagctattcataatgccccatacggtgccaaacaacccgacgaagggggaaatggcgccgatcgtcgccagataaccgttgcctcgtcccatgtagcggccaaccgctgcgacgcgacgttccagacggaagccggtacgttctttaatcccttcgttatcttcgctgccctgagagagttccagttcattctgcgcttcattgatgagctgtgcgctgaggctttttgcgctgaaacctgccgcaatgtcggaagcctgatctaaagagcgcgcatcggctaattgcagttgttcgcgctttaagcggcgcttttgcgtgaaaaattcaacgcttttactgaagaagatagcccaggtgacgactgacgccagaatcaaaccaatcatcacgcacttcacgacaatatcggcgtgctgatacatgccccagacggaaagatccgtctgcatcaaattattacccactctgtatctccaggacgcaaatcacaaaatctgagcataataatatcaaaacaacgtcgaattgatagtcgttctcattactatttacatactgccgcacctttactgctttttctttgcgcttacgcattaaaaaagccacctgtttttattttggcaaaattttcatctgtatcacacgtcgccagggtgcagatggttatattcatgctagtttagacatccagacggttaaaatcaggaaacgcaacatgacggataaacagttggataccaaactggtaaacgcaggacgcagcaaaaaatacacgcttggctcagtgaatagtgtgattcaacgcgcttcttcactggtgtttgacaccgtcgaggccaaaaaacacgctacccgcaatcgcgccaacggcgaattattttacggacgccggggaacgctgacccacttttcgctccaggaagccatgtgtgaactggaaggcggcgccggatgcgcgctcttcccgtgcggcacggcggcggtcgccaacaccattctggcattcgttgagcagggcgaccacatcctgatgaccaacacagcctatgaacccagccaggatttctgcagcaaaattctcggcaaactgggcgtgacgacaagctggttcgacccgctcatcggcgctgatatcacgcaacatattcaaccgaacacgaaagtcgtatttctggaatcccccggttctattaccatggaagtacatgatattccgagcattgttagtgcggtcagacgcgtcgcgccagaagccgtcatcatgattgataatacctgggcggctggcgttctgttcaaagctctggaattcgatattgatatctctatccaggcgggcactaagtatctgattggtcattctgatgcgatggtcggtactgccgttgcaaatgcgcgctgctgggaacaattgcgggaaaacgcctatctgatggggcaaatgctcgacgccgacacggcttatatgaccagccgcggtctgcgcacactcggcgtgcgactgcgccagcatcaagaaagcagcctcaaaatcgccgcatggctggcgaaccatcctcaggtcgcgcgcgttaatcatccggccctgccgggtagcaaaggtcatgcgttctggaaacgagactttacaggcagcagcggcctgttctcctttgtgctcaataaaaagctgaccgaggcagaattatcagcctatctggataacttttcgctgttcagtatggcctactcctggggaggctacgaatcgctgattattgctaatcagccggaacagatcgccgcgattcgtcccgcaggcggcgtagattttaccggtacgctggtccgggtgcatattggtttagagagtgttgatgatttgatcgctgatttagccgccggcttcgccagaattgtgtaaagttgccggggatggacatatatgcagacaatttccgtggaaaagtctgcgtttgttgcgtccgggatcaaggcatcccggacgattcaggagtacaataggcgaataaaagcataaatgctgttccacaggaaagttcatggctgtcattcaagatattatcgctgcgctctggcaacatgattttgccgcgctggcgaatccacacgttgttagcgtcgtctactttgtcatgttcgccacgctatttttagaaaacggtctgctgccagcatcattcttacctggcgatagtctgctgctactggcaggcgcgttgatcgcccaggatgtgatgcattttttgccgacgattggcattctcaccaccgcggccagtctcggctgctggctaagttatatccagggacgctggctcggtaatacgcgtaccgtcaaaggctggctggcgcagcttccggcaaaatatcatcagcgcgccacctgcatgtttgaccgccacggtttgttagcgttgcttgccgggcgctttctggcgtttgtccgcactctgctgccaacaatggcgggtatttccggcctgtccaaccgccggtttcagttttttaactggttaagcggcctgctgtgggtgactgtcgtgaccagcttcggctacgcgctcagtatgatcccgtttgttaagcgccatgaagaccaggtaatgacatttttaatgatccttcccgtcgcgctactggtcgccggactgttaggtacgctggtcgtggtgattaaaaagaaatactgtaacgcctgacgtatccataatcggccaggatggcccgattacgcttcgttgacccgtggcgggatgccccacttagctcccttgcattgtccgcattcttgccgcatcttcgcccggcgtaacgccaaaataacgtttaaactcccggctaaactgcgatgcgctctcatagccgacccgcatcgccgcggcgctggccttcataccgtcgtgaatcatcatcatccgcgctttatgcagtcggtagctttttaaatactgcaacggcgaggtgctggtgaccgccttaaaattatggtgaaacgccgacacgctcatgttcgcttctgccgccagttgctcaacattcaggttctcggtgtatttcatttcgatctgtttaagtacgcgactgatcaggctaaagtgcgtctggcgactaaccagtgcaagcagcgccccgccgcgcggtcccatcagcacatgataaagaatttcgcgaataatttgttttcccagaatccgcgcatccagcgggcgctccatcacatccagcaatctttccaccgcgcataaaatctcgtccgacagcgtggcggagttaatcccactggccgccatcggcaactggaaacgttcatcttcgccaatgtccatgagcaactcttgcagttgcagcacatcaatgtcgagccgaataccggccagtggtacctccggcgttgcccaggtctcgcattcaaaagggagcggcacggtcagtaagagatattcattagcgtcataacgaaacttgcgcttgttaatatagccaattttatggccggaaaagagaaatatgatgccaggctgatacatgaccggcgtgcgcggccccggttcaacaccatacaacagacgaatgcccgccagccgctcgctgattattttatcattattttttaaatgattaattttatccgccaactgtaagcaaattgcttcacgattcataacgcgccattttttcatcaaatccactccgctggattgtgcgcatttttagcgattttctccagcattctggagaaataggcaaaacattggcagaaatgtgcattgagagacatccctcacaagaccacaatgatgaccatcaggcagacagccgcctgccctctttttacccacataagggaatgagcaatgaacaatttcaaattacatacccctacccgcattctgtttggtaaaggcgctatcgtcgatcttcgcgatcaaatcccgcaggacgcccgcgtgctgattacctatggcggcggtagcgtgaaaaagaccggcgtactggcgcaagttcaggaagcgttaaaaggactggatgttcgggagtttggcggtattgaaccgaacccgtcctatgaaacgctgatgaaggccgtgcagcttgtgcgcgacgaaaatattaccttcctgctggccgttggcggcggttccgtactggacggcaccaaatttatcgccgcagcggcgcagtatacggacggcgtcgatccgtggcacattctggaaaccggcggtactgagattcgtagcgcaatcccgatggggtctgtgctgaccctaccggcaaccggctcagaatcgaacgccggcgcagtcatttcccgtaaaaccactggcgacaaacaggccttccactcctcgttcgtgcaaccggtgtttgccgtactggacccggtctacacctatacattgccgccgcgccaggttgcgaacggcgtcgtggatgctttcgtccataccgttgagcagtacgtcacttacccggttaacggcaaaattcaggatcgtttcgccgaaggtattttactcacactgatcgaagaaggtcccaaagcgctgcaagagcctgaaaattatgacgtccgcgctaacgtgatgtgggccgctactcaggcgttgaatggcctgattggcgctggtgttccgcaggactgggcgacacatatgctgggccatgagcttaccgcgatgcacggtctcgatcatgcccagacgctggctatcattctgcctgcgctatggaacgaaaaacgagacgttaaacgtgcaaaactcctgcaatatgctgaacgtgtatggaatatcaccgacggttccgacgacgagcgtattgatgccgccattgccgccacccgccgtttctttgaacagatgggcgtgcctacccgtctgtccgattacggtctggatggcagcactattccggcgctactggctaaacttgaggcgcatggatgcacaaatttaggtgaaaatcaggatattacgctggatgtcagccgtcggatttatgaagcggcgcgctaaggttttttcgcctctgactttcgtttttggccatttcgtccagacttaagtcacttagtctcgccggacccgactccggcgagccaattaaaagaggaacacatcatggctaatccaaccattatcaggctacaggatggcaacgtaatgccacaacttgggctgggagtctggaaagcaagcaatgaagaggtgatcgcggcgattcataaagcgctggaggtgggctatcgatcgattgataccgccacagcatatcagaatgaagaaggcgtcggcaaagcgctaaaagcagcgagcgtggcgcgggaagagctgtttatcactaccaagttgtggaatgacgatcaaaaacgtccccgcgaagccctgcaggagagtctgaaaaaactgcagcttgattatctcgatctctatctgatgcactggcccgtaccggctatcgatcactatgtcgacgcctggaaaggcatgatcgcgctgcaaaaagaggggctggtaaagagtatcggggtctgtaactttcagatccatcacctccagcgtctgatcgatgaaaccggcgttacccctgtgatcaaccagatcgagcttcaccccttgatgcaacagcgccagctacatgcgtggaatgcgacgcataaaatccagaccgagtcctggagcccgctggcgcagggtggcgaaggcgtattcgatcagaaagtgattcgcgaactggcggataaatacggcaaaacgcccgcccagattgttattcgctggcatctggactgcgggctggtcgtcattccgaaatccgtcaccccttcccgtatcgcggaaaactttgctgtctgggatttccgtctcgataaagatgaattaggcgagatcgcaaaactggatcaaggaaaacgcctcggtcccgatccggatcagttcggcggttaagccggatttatcgcacgccatgcccgacgatgtcgtcgggcttttttgcattccgaaacattaagaaacaattacgcgcatttaacagtatatttcccccacacacaagcgcagaattattctgattttgtgaatatttattcatatttattatgaatttacttaatacatataaaatatttatggatgtgtaattgtggcggaaaaaaaatctcagggcgtcaaatggctcccatttattcttattctggttatcgccgccggactgtggcagctaacgcccccttccgggttaagcgcgccggcctggcattccgcgattatttttgtcgcgacgatcgcctctatcgtggcgaaagtgctgcctattggcgcagtcggtattatcggcatcaccgtctttgcgctcgcctatgctgccggcgacaaaacggccagcggcgcgattaccacggccttgagcgagctgaacagttcgctgatctggcttatcgtcgtcgcctttatgattgcccgtgggtttatcaaaaccgggctgggtcggcgtatcgccctacaaatgatccgtctgttaggtaaacgaacgctgggtctggcttatggtctggcgtttgccgatctgatcctctcccccgcgatgcccagtaacaccgcgcgctgcggcggcgtgatttacccgatcgccgactcgctggcgcgcagctttgattcacatccggaagatgagtctcgcagcaaaatcggcacctttctgatcacctgtattggcaatgttaacgacgtcaccgccgcactgtttatgaccggttatacgggtaacctgctggcggtaaaactggcggcgaacgccggcgttacgttgagctggggaagttggtttatcgccgcgctcctgccttgcctggtctcttttcttatcgtcccgctgctggtctactggctgacgcgtccggaaattaaacatacgccggatgcgccggatttggcgcgcaaagagctggcgcaaatgggcagtatgacgcgcggcgagtggctcatgctggcgaccgtcggcgtgttgctggtgctatggatttttggcagctcgctcggcgtggatgccacgacggcctcttttgtcggtctctctattttattactgagcggcgtgctcacctgggaagacgttaaaagcgaaaaaggcgcctgggatacgttgatttggtttgccgcgctgctgatgatggctaaccagttgaagaaactaggattcaccagctggtttggcaacctgattggcgacagcatcggcagcacgatgcatggaaccagttggataatcatcctgctgctgcttaacgcagcctatttttatacccactattttttcgccagcggcaacgcgcaaatcgccgcgctgtatgcggtatttctgggcgtcggtctgcatctgaatattccggcggcgccgatggcgctcatgctggcgtttaccagcagcctgtactgctctcttacgcagtatacccacgcacgcggccccattctttttggcgccggctatgtaccgacgggcgtctggtggcgaacgggatttattatcagtctctttaatcaggcggtctttttgacagtcggcctcgcatggtggaaagtgttagggttgtattaaacgcttaactcatcgataagcccctcggttaacggagaaatggaatgacctgcattttctgtcaaatagttgaaggtaaagcaccttgtcataaagtttgggaagatgagcatcacctggcttttttgtcgatttttccgaataccgatgggtttaccgtagtgatcccgaaaaaacattaccccagctacgcgttcgatctaccgccgcaggcgttagcggacctgatgctggcgacccaaaaagtggctaagaaactggataaggctttcccggatgtcagtcgtacgggaatgttcttcgaaggtttcggcgtagaccatgtgcacagtaaattaagccccatgcacggtactggcgatttaacccactggaaaccgattgaatcgcggcagaataaatttttcgaacagtatgaaggatatctgtcgtcacacgatcatgaacgggctgatgatgaaaaactggccgcgctggcggccagaattcgtgaggcataaatacggagcacttctgccggatggcggtgtaagcaccttatccggcctacaaaactgtgctattcatagacctgataagcgcagcaccttcaggcattataccttagattatatacttcttatctattttaatatatcaaccctggtaggttaaatattacggcgcgtggctaaatatttcgtacaaaaaccatccaggaatagcggcaataacacccattaaaattatccctgcaagagtcatttgcctatcttcacgtttttccatactacatgctttaatagccattatgaatataacaacagctattatagcaattacgataaaacagggaataataatcatacccatgatatcccctcctctggggctgtataaaagcatcatgccttaatcattaaggtaatatataattaatttatacaatcaataatatttaaataaaatataaagctccccgtaatttagcaattactaaagaccgatacaatatatttagatgtctgttacttccaaaaacattagcttccagaagcaacagattcaaaggtaattaacgccctgcgcctttcccgcgcttcttattagcggcaagcccctgccgctgatgttccaccggcgtatgcttggtcaacgccgggcgggtattgcggttctggcgacgcgcttcgcgcatctcttcaatggtcggcgcaggcaccagacactcacggcgaccgccaatcaaatgctttttccccatcgcttccagcgcctggcgaatcagcggccagttcgccggatcgtgataacgcagcagcgccttatgcaagcgacgttgcctgtctcccttcggcaccaccacatcttcactcttataaccaattttacccagcgggtttttgccggtgtaatacatggtggtcgaattcgccaacggcgacgggtagaagttctgcacctgatccaaacggaagcggtggcgcttgagccacagcgccagattcaccatatcctcgtcccgcgtgcccggatgcgcggagataaaatacgggatcagatactgctcttttccggcctgtttagagtaaaggtcaaataactctttaaagcgatcgtagctgcccatacccggcttcatcattttcgacagcggaccttcttcagtatgctccggcgcaatcttcagatagccgcccacatgatggctcgccagctctttaatgtagcgaggatcttctacggcgatgtcgtagcgcacgccggaggcaattaagattttcttaatgcctttcagctcacgggcgcggcgataaagattgatcgtcggcgtatggtcagtatccatatgcggacagatatccggatagacgcatgacaggcgacgacaggtctgctccgcacgcggcgacttacagcgcagcatatacatgttcgcggtaggaccgcccagatcggagatcacgccggtaaaccccggcaccgtgtcgcggatcgcttcgatctcgttgataatagagtcttccgagcggctctgaatgatgcgcccttcatgttcagtgatcgagcagaaagagcagccgccaaagcagccgcgcatgatattgatcgaaaagcggatcatctcataggccggaatacgggcattgccgtaagccgggtgcggcacacgctgatacggcagcgcaaacacgctatccatctcttcagtggagagcggtatggcgggcgggttgatccagacatagcggtcgccgtgtttttgcatcagcgcccgcgcgcagccagggttagtttcgtgatgcagaatacgcgacgcatgggcgtacagcaccttgtcgcctttcaccttttcaaaggatggcagcaggatataggttttttcccacggcttcggacgcggcggctgcacggtaatcgctttagcttcctgctttttcggcgcgaccggcttgttatccgcgcacggcagatcctcaccatagggatggggaattggatcgattttacccggcgtgtccagacgagtggagtcgacgccgctccagccaggcagcgcttctttaaccataatcgcagtgttacgcacgtcgcgaatctgatcgatggtttcgcccattgccagacggtgcgccacttccaccagcggacgctcgccgttgccaaacatcagcatgtcggctttggaatcgactaacaccgaacgacgcacagtatcagaccagtagtcgtaatgcgcggtacggcgcagactggcctcaatgccgccaaggatcaccgggacatctttccacgcttctttgcaacgctgggtatagaccagcgtggcgcggtccgggcgtttgcccgcgacgttatccggggtgtaggcgtcgtcatggcgcagcttacggtcggcggtgtaacggttgatcatcgagtccatgttgccggcggtgacgccgaagaacaggttcggttttcccagacgcataaagtcgtctttgctgttccagtcaggctgggcgatgatccccacgcggaagccctgcgcttccagcatacgaccgcaaatcgccatgccgaagctcggatggtcgacgtaggcgtcgccggttaccagaataatgtcgcagctatcccagccaagttgatccatctcgtcacgtgacatcggcaaaaacggcgccggcccaaagcaggcggcccagtactgcggccaggagaaaaggtcgcgatccggttggatcagggagatagcgctcatattgcttccaaaacgattggcaaaaaaataatcaaaggtcggggattataagccgtatctatagcgaaaatgaaggagattatcgccttatatgcagggctggcgcgaaatagaaacaactttaaacggcctggcctgatgtgtttgaaattggtcttatgaatatctccaaattggtatgcaattaattatacccacgtctaaaaacgcagtatcgccataacaacaaaaagtaaaaaaatatcatattatcagtaatatataaaaaaacttcgctgaattgctcacggcactgtttttaccatgactttcttctgtgaaccagatctctttctttggtctattgattaaattaaattggctgacagagttcaggggataaagaacaccatcaccacgcctttcccctacgcaataccttacgtatcagcaggttattaattaatcaacgataaccacaggaatcccaacctataaggaagcagatatgaaaaacacacgttcattcacaacatcagcggtattactggccggctgtttgctactggcatttccagcgctcgccaaaaccacgctgaaactgagccacaatcaggataaaagccacgccgttcacaaagcgatgagctatctggccgataaagcgaaagcctattcggacggcgaattaaatattcgtatttaccccaacgccacgctgggcaacgaacgtgaatcgctggaattgatgaactccggcgctctgcaaatggtgaaagtcaatgcggcatcgctggagtcttttgcgccggaatatagcgtgtttagcctgccgtttttattccgcgaccgcgatcactactacaacgtactgaaaagcgacttagggaaacgcattctcgcgtcctccgaaagcaaaggcttcgtcggcttaacctggtacgacggcggcgcccgcagtttttacgctggtaagcccatcactcaacccgacgatttagccggtatgaaaatcagagtgcagcaaagccccagcgctatcgcgatggtgaaagcgctcggcggcgtgccgacgccgatggcgcaaggcgaactctataccgcgctccagcaaggcgtggtcgatggcggcgaaaacaaccccgtggtttatgccgatatgcgtcatgcggaggtggcgaaattctattcccgcgacgagcacacgatggtgccggatgtcctggtcatcagtaccaaagtacttaacaaattgagcgataaagagcggaaagcgttatataaagccgcagatgaatccatgcagcaaatgaaagacgtcatctggcccgccgcggaaaaagaggcttatgagagcatgaaggccatgaatgcgaccgttgttgatattgataaatccgcgttcaaacagcgtgttaagcccttgtttgatgagttccgcgcgaaagatgctcaatcagcgaaggatctggaatacatcgagaatatgtaaatctgccgggcagggttctcctgccctttacaggatgtaatatgcgaatactcaccaatgcactgaacaaaatactggccgggtgctgctgtattattctggcgatcatggttgcctgcgtatcctggcaggtggcggcgcgctttatattcaacgcgccaagcagcacgctcgacgaattcacccagattctttttatgtggatgattctgttaggcggcgtctataccgccggattaaaaaaacatttagctatcgatttgttagcgcaaaaactctcccgaacgcccgccctcgtgctcgacagtatcattcaggtgattattaccgtgttcgcgctgatttttatggtgtacggcggtgatattattgttgaaaaagcggcgcacgtcagccaaatgtccccggtattaaaatggcctatggataaagtctattgggtcatgccgattagcggcgtcatcctggtgtactacaccattgtgaacgttattgataattatcatcagcgccatcttcgctaacgagggatatatggactttgaatatatttacccaataattgttttatttggcagctttgccattatgctggcggtcggcgttcctattacattcgctatcgggctgtcgtccttattctcaatcctgatagcccttcccccggatgcggcaatctcggttatttcgcaaaaaatgaccgtcggtctcgatggctttacgctgctggcgatccccttttttgtgttagccggcaatatcatgaataccgggggaatcgcccggcgcctggtgaatctggctcaggcgttagttggccgccttcccggttcgctggcgcactgcaatattctggcgaacaccctgtttggcgcgatatccggctcggctgtcgcttctgcggccgcggtgggcggcatcatgtcgccattacaggaaaaagagggctactctccggcgttctctacggcgatcaacgtcgcttcggcgccgattggcctgatgatcccgcccagcaatgtgctaattgtctattcgctggctagcggcggcacctctgtcgccgccctgtttttggcgggctacctgcccggcatcttaaccgcgctggctttaatgacggtagcggcgctgtatgcccatcgccaccattacccggttgccgaacgcatcaacctgcggcagtttctgtcggtattccgcgattcattgcccagcctgttgctgatatttattattatcggcggcattatcggcggcgtatttacgccaacagaggcctctgcgatcgcggtaatctatagcctggcgctggcggccatttatcgagaaattaatgtgagtaagttgcgcgatattctgctggattcggtagtaaccagctctattgttctcttactggtcggctgctcaatgggaatgtcatgggcgatgaccaatgctgatgttcctgaactgattaatgaaatgattaccagcgtgtccgaaaataaatgggtcatcttgctgattatcaatctcattttgttactcgtcgggacgtttatggatattaccccggctattctgatctttacgcctattttccttcccattgctcaacatctgggaatcgaccctgtccattttggcattattatggttttcaatttaaccatcggactgtgtacgcccccggtaggcactattttgttcgtcggttgcagtatcggcaaaatcagtattgataaagtcgtcaaaccgctattaccgatgtttctggcactctttgtggtcatggcgatgatttgctacttcccgcagttgagtctgctgcttcccacgctgtttgctccttcctgaaaaccctgacgggtctgcgctattcagacccgtactcggacgctttacgacgccggattcaccagcatttgcccaatcgagccgcggtcagccatttccagcgtctggctgttgaaatagaacgggaagtgcggccaggacggctgaccgtaatagaccagcaattcgacttgcccatccacccagacggtatctttccagcctctatcttccgggaacggcatagcgccgttgacgttacgaatcaggaaagagacgccctcaatatggaacgactgcggcatatcggcgcgtaccgtccagcgctcccaggtgccttgttgggcggtaatatcaatgcgattcacatcccacagttggccgttaatccccggatcgtcgccaagactgatgtcccgactgcggacaggcgcgccgctcatgatctccgtcggcaacagacgcatcggcagattatcggtcaccagcggcagcaatccggttggccgtaacgtcagcaccagggtcgaaaccagaatactggaaggctcaaagaaaccgcgaatccgatcgactatgctggccgcttccccgcaggtgatcgagacttcgtcgccgttggtcatatcaaccaggatttcacgtcgctcgccgggcgccagtgacaactgtttgacggaaaccggcgcaggtaaaaagccctgatcgcctgaaatcacatgcagcgcccggccatcgctcatctgaagctgatagcgccgcgagttcgaggcgttcaacaaccgtaaccgcacccagccgcgggacacttcgacataggggctttgcgcgccgttcaccagcagcgtatcgccgacaaaaccaccgcttcccggttcgctgtactccggcgtcccaaagttatccagccgtttatcctggataatgacgggaaaatcatccacgccgtaatggttcggaatgggcagcgttttactaatgtcgtcttcgaccagccacattccggccaggccgttatacacctgctgcgcagtgcggttaggcgtgttagcgtgataccacagcgtcgcggcgctctgacgaatcggcaacaccggcgcccagtccgcgttcggcgacatcatacgcgccgggccacccatcagcggccccggcaccagtaaaccagcaaccgtcatggagacattttccgccaggcggttgctatagatgagtttaacgtcatcgcctttccagacgcggattgtcggccccagataacgaccgttcactccccagaccggcgcgcgcgtgccttgcgtaaaggaccagtgcgctcgctgtagcgtcataaacaacggctgcccgcgacgggactccagcaacggcggaacaggcaacggctgttgctgaccggcagcattcgccctgaggggaatcgcgcctgcacatagtgcgattcccgatgcctgaagaaactgacgccgactgaatgacatataagctccatgtaaaacaggctaaagagttgtgcctgaaaaaatgatttctacaataacagagtaagactgcttaaaccttaccggtcgcttcacgttccgcaacctctttatcaagttccgcgattttttgctccattaacgcacggcagtgggccgccagctcgcgaacctgatctttaccatattcgctgacatcgactggcggcagcatttccacaataaccagtccgttgttcaggcggtttagattgactttgttagaggtgttggaaacgcagacaggaatgatcggcacaccagccgcgatagccgcatgaaacgcgccggttttaaacggcagcagaccgcgtccccggctacgcgtaccttcagggaacatccagatagaaatacggcgctttttaaaatggttaaccactgccgcaatggtgctatgcgctttggcgcggttattacggtcaatcaacagattaccggtcagccagtacagttgcccaaaaaacgggatccaaagcaggctttttttccccaccgtcaccgttggaggctgcacaatattcgccgccgtgaccatatcataattattctggtggttagcaatatagatagcattgccatagttttccgcgtcggcgggtttgcggcactccactttcaggccaaacagcggggccagacgaccgaacatatgtccaaacgtcgccacgtgttttgggttacgtgggctgaaaaggcagtaaatagaaccgaaaacacagaccagaatggagtaaataacggtaacaataagacgaaaaatatatagcataacaacctctgaaggcctaagagcccggcattctacgtcacctgaaattcaggttaggattttggtaagtgtggctctctggaaaaacgtattgttaatcgcaatgcacgaataaacaacggttttacgggaaattttaatgttaatccgatctgaaaccgtaggccggataagacgctactgcgtcgtcatccggcaacggcagagcgccggatggcggcttagatgccttgtccggcctacgggcgcccctgtcttactcttcgctgtcgccatgacttacgcgatgcggcgaatcaatctcaatgcgatcgatacgctgcaggccgcgcattaatgtgccacggcgtccgcgttcaccgactaccttttgtaactcttcagggcgcagtttgattttgcgcttcccgacatggatagtcagagtgctttgtggcggcagcacgtacaggtgcgccagtccatcatcgcctttcgccgcttctgcagaggggatattaatgatcttattccctttgcctttcgacagctgcggcagagagtctaccgggaacatcaacatccgtccggcctgggtaatcgccagcagcatatcgtgctcgtcttcaatcaccagcggcggcatgacgtgcgcattttccggcagtgtaatcaacgccttaccggcacggttacgggcaaccagatcgttaaacgtacaaacgaagccgtagcccgcatccgacgccatcagcagtttctggtcatcgccttccatcagcatatgctctacggtcgcccccggcggcagcgtgagtttgccggtcagcggctcgccctgcccacgcgccgacggaagcgtaatgggatcaatagcatagctgcgcccggtggtatcaataaacaccaccggttgattactcttacctttcaccgcggctttaaagctgtcgcccgctttatagttaagccccggcgcatcaatatcatgacctttggcgctgcgcacccagcccatctgcgacagcacgatagtcaccggttcggacggcagcatgtcgtgttcgctcatcgctttagcttcttcgcgctcacgcagcggagaacggcgatcgtcgccataggcatcggaatctgcctgtagctcttttttcagcaaggtattcattttgcgttcggacgcgagaatgccctgcaactggtcacgctctttttccagctcgtcctgctcgccgcgaattttcatctcttccagtttggcgagatgacgcagtttcagttcgagaatcgcttccgcctgggtttcgctgatgccgaaacgcgacatcagcgcgggtttcggctcatcctcgttacggataatctcgatcacttcatcgatgttgagaaacgccaccagcaaaccttcgaggatatgcaggcgcttaagcactttctccagacgatagttcagacgacggcgcaccgtgtcgcggcggaacgccagccactcggtgaggatctccagcaggtttttcaccgccggacgaccatccagaccgatcatgttcaggttaatacggtagcttttttccagatcggtggtggcgaacagatggttcatcacctgctccatatccacacggttggagcgcgggacaatcactaaacgcgtcgggttttcgtgatccgattcatcgcgcaggtcgtccaccatcggcagttttttattgcgcatctgcgcagcaatctgctccagcacttttgcgccagatacctgatgcggcaacgcggtgatcaccacggcgccgtcttctttggtccataccgcgcgcatacgcacggagccacgcccattttcgtaaattttacgaatttccgcacgaggggtaatgatctccgcttcggtcgggtaatccggcccctggacgatatccagcaactgatccagcgtcgttttcggctgctcaatcagcgtaatcgccgctttcgccacttcgcgcaggttatgcggcggaatatctgttgccatgcccaccgcaataccggtggtgccgttcagcaggatgttcggcagacgcgccggtaacattttcggttcctgcatggtgccgtcgaagtttggcacccagtccgccgtcccctgaccgagttcgcttaacagcagctcggcgtatttggacaggcgggattcggtataacgcatcgccgcgaatgacttcggatcatccggcgcgccccagttcccctggccatcgaccagcgggtaacggtaagagaacggctgcgccatcagcaccatggcttcatagcaggcgctgtcgccatgcgggtgatacttacccagtacgtcaccaacggtacgggcggattttttaaatttagcggtggcgttcagccccagctctgacatcgcatagacgatgcggcgctgtaccggcttcaggccgtcgccaataaacggcaacgcacgatccatgatcacgtacatggagtagtttaagtaggcgttttccgtaaattcatgtagcgcaaggcgctctgccatatcgctcattaacaggggatcctcaatctgcatgctgaccgttcggacggcaatattgccgcagataataccctatctcacggtctgagtcacaaaccgtgagacaggtggcgaggaagttaacgaagcggcagatagatatccgtcagcagctcatgttccgcgacctcatggacgaaattcaggtactggaagaagaccggaaaatcgcgcggcgtctcaccgctggcgggtagccattcgcggaataaataccacacgctctccgggaggctgtcgagcgatccctgatggcgcaccaccgcgcagcgcccgccaggaatctcgctattcaccacgccaacgtcattttcggctatcggctggcggacgctgccgcagatatcaaagcggaattgagccggcggcgtcgtctgcgggtcgtgccaggcaataccaaaagtttgactgctggcaatcggcgactggcccgtttcgcgtcgccatgcaataaatttcgccgcgctggcgttgaccttatccggatgccccagatgcgtcagcatcgcgacgcgggtaggtggaaattcaacgatttttacgtccatgacatgctgctcctgtaacgcaagtttaggaacgcgttggtgccaggccagccagtccggcgattgccgaaaccggcacgggctttgaccaaacgcggttttgaaagcacgtgtgaacgactccggattctgaaatccggcatccagcgcgatatcgataactttatcttgcggattaaacgccagccgccatgacgcccggcgcaaacgcagccactggatatagcgatagagcggaagcccgctccagacggtaaactgccggtgaaaatgaaacggcgagctgtgcgccatccggcttaacgcctcaagcgacagaggctcatccagatgacgctcaatgtggtcgcaaacgcgccgcagacgttcggaataagccgcgctgatcaggtcattcatcactgcctccttgtggcctattctgcccaccgggcggctgtgaatcctgaccgatcttgcgcaatgtgggattacggattcactttacgaatctgttttacgtcgatttcgacagagttccagtctttatccacttcaccctgaatttcaacggtatcctgcggggttacggtcaggccgttccagcgcttgtggtcaatatccacattgatagtaccggtcgcatctttaaacacatacaggtcgtcggaaatgcgctcgacgatattcccgcgcaacgttacccacgcatcgtcacgcagcgatttagcgctctctaccgtcgtgctgctgccgttcgggccgacaaatccgccgccttgcgtttgcgtcgccgacgggccggagaaaccgccctgctgagccgccagaaccggggtagaacacagtgccataacggcaacgattgcagctaattttttcatgattacttttccctttcatgtcgtttcagatccatttaataaggtaatccttaacaacttcttaaggcaaaaaaagaatctttttttctgtacatcgcctgcggcgacaaggttaactgacggtaacgcgagttaccgcaaggaagaacagatgcgaattttactggtagaagatgacacacttattggcgatggcataaaagcgggcctgagtaaaatgggtttcagcgtcgactggtttaccgagggacgtccgggcaaagaggcgctttacagcgcgccttatgatgcggttattttagatttgacgctgccaggcatggacggacgggatattttgcgcgaatggcgcgaaaagggtaaacaggaaccggtactgatcctgacggcgcgcgacgcgttagcagagcgcgtcgaggggctacgtctgggcgccgatgactatttatgtaaacctttcgcgctcattgaggtcgccgcccgtctggaggcgctggtacgccgcgccagcggtcaggccagtagcgaattgcgccacggccaggtgacgctcaatccaggcaatctcgtcgcgacgcttgccggcgaaccgctggccctaaaaccaaaagagttcgcgttgctggaactcttactgcgcaacaaaggtcgcgtgctgccgcgcaagcttattgaagagaagctgtataactgggatgacgacgtgtccagcaatgcagtggaagtccatgttcatcatttacgccgcaagctcggcagcgaatttattcgcaccgtgcacggcatcggctacaccctgggtgacgcatgaaattgacgcaacgtctcagcctgcgcgtcaggctgacgcttattttcctgattctggtctccatcacctgggcaatctccagttttgtggcctggagaaagacgacggataatgtcgacgagctgtttgacacacagttgatgttgttcgccagacggcttagcaccctcgatcttaacgagctcaacgccccgcagcgcatggcgcatacgccaaagaaattaaaacatgggcatatcgatgacgatgcgctggcgttcgccatcttttccgctgatggcaaaatgttgctgcatgatggcgacaacggccaggatattccgtatcgctatcgccgggaaggtttcgacaatggctatctgaaggatgacaacgacctctggcgttttttgtggttgaactcggcggacggcaagtatcgtatcgtcgtcggtcaggagtgggattaccgcgaagatatggcgctggcgatcgtagcggcgcaattaacgccgtggctgatcgcccttcccttcatgctgctgattttattgctcctgcttcaccgcgagctcagaccgttgaaaaaactggcgcaggcgctacgcttccggtcgccggaatcggaaacgccgctcgacgccaaaggcgtaccgagcgaggttcgcccactggtcgaagcgcttaatcagctttttagccgcatccactccatgatggtgcgcgaacggcgatttacctccgacgccgcccatgaattgcgcagcccgctggccgcgctgaaagtacaaaccgaggtggcgcagctctcgggcgacgatccgctatcgcgtgataaagcgctgacccagctccatgcggggatcgatcgcgccacgcggctggtcgatcagctactgacgttatcgcgtctcgactcgctcaataatttgcaggatgtagcggagatttcgctggaagagctgctgcagtccgcggtaatggatatttatcatccggcgcagcaggcgaatatcgacgtgcgtttacagcttaacgcccatgacgtcatacgtaccggccagccgctactcttaagcctgttagtgcgtaacctgctggataatgcgattcgctacagtccgcaaggcagcgtcgtcgacgttaccttacatgcccgcagcttcaccgtcagagataatggccctggtgtagcgccagagattctgacgcatatcggcgagcgtttttaccgcccgcctggccaaagtgtgaccggcagcggtctgggattatcaatcgtccgtcgcatcgctacgctgcacggcatgacggtgtcgtttggcaacgccgcggaaggtggatttgaggccgtagtaagttggtaacacagacttttgccaaaaacgcaaaagactttgcacattttgctaatttcaccgcaccgcccgtcagcgtagaatcagcagcaaacgcatttcttgaggacacaaaatgagtaacatcctgattatcaacggggcgaaaaaattcgcgcactccaacggccagttaaatgacaccctgaccgaagttgccgatgggctgctgcgcgatctgggtcatcaggttaagatcgtccgcgccgacagcgactatgacattaaagaagaggtgcagaatttcgtctgggctgacgtggtgatttggcagatgccaggctggtggatgggcgcgccatggacagtaaaaaaatatatggatgatgtctttaccgaaggtcacggcacgctctatgccagcgatggccgcacgcgttccgatgccgctaaaaagtacggttccggcggtctggtgcaggggaaaaaatatatgctgtcactgacgtggaacgcgccgatggaagcatttaccgaaaaagatcaatttttccacggcgtaggcgtagatggcgtctatctgccattccataaagccaaccagttcctgggcatggacgcgctgccaacgtttattgccaacgacgtgattaaaatgccggatgttccgcgctataccgcagaatatcgcaagcatctgagcgaaatttttgcttaactggtcatcctggaattagaaggagttaaccatgcttaccgtcattgccgaaattcgcacgcgtccgggccaacatcaccgtcaggccgtcctcgaccagtttgcgaaaattattccaaccgttcttaaagaagaggggtgccacggttacgcaccgatggtggatcatgccgcgggcgtgagttttcagactctggcgcctgactcgatcgtgatgattgaacagtgggaaagcgttgcgcaccttgaggcgcatctgcaaaccccgcatatgaaagcctacagcgacgcggtaaaagacgatgtgctggaaatgaatattcgtattctggaatccggcgtttaagttattaccctcgtctgacgtctccctgatgcgatgcgcaagtgtcgccatcaggctgcggcgtcatgtcgaattcgcttatccggcctgcggcgcgcagaccggataaagcgtgcaacaatcgttacacgtcgagatccgcgagatcgcctttttcctgtagccagttgcgtcgatcttcagaacgtttcttcgccagcagcatatccatcatcgcgttagtacgctgatcgtcttcatcgctaatggtgagctgcaccaggcggcgagtatttggatcaagcgtggtttcgcgtaactgcatcgggttcatttcacccaggcctttgaaacgctgtacgttcggcttgcctttcttacgcttcagttgttccagtacgcccgccttctcttcttccgtcagcgcgtaatagacctctttacccaaatcgatacggtatagcggcggcagcgcgacgtagacatgaccattcttcaccagcgcgcggaaatgtctgacaaacagcgcgcaaagcagagtagcgatatgcaaaccatcggagtccgcatccgccaggatacagatcttgccgtagcgcagctgactcagatcgtcgctgtccggatcgataccgatcgccacggaaatatcatgcacctcttgcgaggccagcacttcatcggaagagacttcccaagtgttaaggatcttacctttgagcggcatgatcgcctgatattcgcgatcgcgcgcctgcttggcggaaccgcccgccgaatccccttccacaaggaacagctcggtccgattaagatcctgcgcggtacagtccgccagtttccccggcaacgccggaccgctggtgagctttttgcgtaccactttttttgcggcgcgcagtcgccgctgcgcgctggcaatcgccatctctgccagttgttccgccgcctgcacgttctggttcagccacaggctgaaggcatctttcaccacgccggaaacaaatgccgcacattgacgcgacgacagacgctctttggtctgcccggcaaattgcgggtcctgcattttcacggagagcacataagcgcagcgatcccagatatcttccgccgacagtttgacgccgcgcggcagaatattgcggtattcgcaaaattcgcgcatcgcgtcgagcaggccctggcgcagaccgttgacgtgcgtccccccctgcatggtcgggatcaggttgacgtagctttccgtcagtaattcgccgccttccggcagccacaatagcgcccagtcaacagcttccgtttcaccgttaaaattaccgataaacggcttttccggcagcgtcggcaggccgtttaccgcttcgcccagatagtcgttcagaccatcctggtagcaccagcgctgctcgctgttattcacttcatctttaaaagtgatttccacgccgggacacagcaccgcttttgctttcagaacgtgcattaagcgagagacagaaaaacgcgggctgtcgaagaaactttcgtccggccagaaatggacgctggtgccagtattacgtttaccgcaggtgccgacaacctgcaaatcctgcactttctcgccgttttcaaacgcgatgttatagacctgaccgtcgcggcgcacggtcacttccacgcgctttgacagggcattcacgaccgaaatccccaccccatgcagaccaccagagaactgatagttcttattggagaatttaccgccggcatgaagccgacagaggatcagttctaccgccggaaccccctcttccggatggatatccaccggcatcccgcgtccgtcgtcaatcacttccagcgattgatcggcatgtaaaatgacatccacgcgtttggcgtgacctgccagtgcttcatccacactattatcaattacttcctgacccaaatggttgggacgggtcgtatcggtgtacatccccgggcggcggcgtaccggctcaagcccagtgagtacctcaatggcatcagcgttataagtttgcgtcatggtttaattagcaattcgaattgattgtcagcaactgtgcagtccaagaaaatcgacaatctggttgaaataatcttcgaagcccgtgaatgcgtgattaccaccctcggtcactgtctgacggcaggaggcgtaatatgccaccgcctggcggtaatccagcacttcatcgcccgtctgttgcagtagccagatcaggtccggcgcttccagcgggtcaatctgcatgactttaagatcataaatatggcgagactctagcacatattgctgcccggtgtaggggttctcgttctgaccgagatagtcggtcagtaattcaaagggccgcacggcgggattcaccaccacagccggcagcataaaacattgcgacagccaggtggcgtaataaccacccagcgacgatcctaccagccctaatggcgcaccgccatgctcaagcacgagagattccagcaactccgccgcatcggcaggatacggcggtagttgagggacgatcatctcgacatgcggatgacgctccgccagccagttttttagctggcacgcttttgccgagcgaggggaactgttgaatccgtgcaaatagagaagcgtagacatcagtatccttccgaagcggtatcgggtcggaaccgggtatcctgcaggcgatgcacttccgtctccaggacgccgttcgcctggagctccagcgtacgccagcccggcgcgatagtatccagcgtaaagttcgcgcagtgcggtttgaactgtacgcaggttgacggcgacgccagcagacgccgtccgttccagtcgagatccagctcctggtgaatatgtccgcatagcagatactttacacgcgggaaattcgccagcacgctatccagctcaccagcattacgcaagctgtgctgatccagccaactgcaccctgccggcaacggatggtggtgcaacaggagcaatgtctgtctctctggcgcatcggcgagcttacgctcaagccattccagttggaactcgctcagttcgccatgcgggacgccaaacacctggctatccagcaacaaaatctgccattgttcaccgattaacacgcgtttagccggggaaatccccgcctcttgcagcgcgctgtacattgccggctgaaaatcatgattgcccggtagccaaacgcaaggcgcgcgaaagcttgcgataccctcagcaaaatgctgataagccgcagcggattgatcctgcgccagatcgccggtggccacgatcagatcatattcatactgttgcgcccgaatagcctccagcacggcctggtaactttcccaggtattgacgcctaacagcgtttcatgcttttcggcaaacaggtgagtatctgtaatttgtaaaatcctgactcgggcctcaccagccagaggtagggttaacaggctttccaaatggtgtccttaggtttcacgacgctaataaaccggaatcgccatcgctccatgtgctaaacagaatcgtagccagtcggccagaaactgattaatttgatgcttttcgtcgcgttgatgcaactttttatttggataatcataccgcgctttgaagcgaaagatctgctggcttgaacacacttcagccaccatcgcatcatggtagaggcgcaccgtcagcgacggcaggctccagtaggtgatggctggcgccgtttgctcgatcgttacaagcgtagtgtatcgggtcgattccacaatcgttaaccgatattgtacgttgcccacctgatagctcaccgtttcaccgggggcgtcattgcgcggcagcaggcggcgcaattgcgaaaaattggtttcgcacaaacgcatcatttctgggaagtcaggtgtataacgcttcattttttccactcgttttttaactcttgatgatgcaactgaagccattgcaaagcgatgactgcggctgcgttgtcgattttcccctcttctacccactggtatgcctgttcccggcttaccacatgaacccgaatatcttcgttttcatccgccagaccatgaatacctaccgcggtcgtggcgtccacttcacccaccagaatagatgagcgctcgctggttcctcctggactcgccaggtaactgatgaccggtcgggtgcggcctacggtcagccccgcttcttccatcgcctcccgccgggcgaccgcctcaatggtttcgccttcttctatcatgccggcgaccatctccagcagccacggcgtaacgcttgtgtcgtacgcggcaatacgaatctgttcgaccagcaccacctcgtcgcgttcagggtcaaagggtagcaagacggcggcgtgcccgcgctcaaaaatttcgcgctttacctcgccactcatttctccgttgaataaacgatggcggaatcgatacacatccaatgaaaaaaaaccgcgatagcgcgtttcccgtgcaataatttctacatcgcttttggtgaaagtaactggcaagttgtctgatttacgcattgtgctgccctgctagcaataatgattaaatgatgaatttcaagggtggttgactgctgttttatcacccttgtggtaaattggtgccaattaaggctcgtatggcacgtaacgccaactttttgcagtggcggattctgctagaatcagcaattatttttacaaattgatcagcgctaaatactgcttcacaacaaggaatgcaaatgaagaaattgctccccatccttatcggcctgagcctgtcggggttcagcacactaagccaggcagagaacctgatgcaagtttatcagcaagcacgcctgagcaacccggaattgcgtaaatccgctgccgatcgcgatgctgcattcgaaaaaattaacgaagcgcgtagtcctttactgccgcaactgggtttaggtgccgactacacctacagcaacggttatcgcgatgcgaacggtatcaactccaatgaaaccagcgcttccctgcaattaacgcagacactgtttgatatgtcgaaatggcgtgggctcaccctgcaagaaaaagcagcaggcattcaggatgtcacctatcagaccgatcagcagacgctgatcctcaataccgcgaacgcgtattttaaggtattgaacgctattgatgtgctttcctatacccaggcgcaaaaagaggctatctaccgtcagttagatcaaacgacgcaacgttttaacgtgggtctggtcgccattaccgacgtgcaaaacgcccgtgcgcaatatgataccgtactggcgaatgaagtgaccgcccgcaacaacctggataacgcggtagaagagctgcgccaggtaaccggcaattattacccggagctggcgtcgcttaacgtcgagcattttaaaaccgacaagcctaaagctgttaatgcgctgctgaaggaagcggaaaaccgtaacctgtcgctgttgcaggcgcgtttaagtcaggatctggcgcgcgagcaaatccgtcaggcgcaggatggtcatctgccgacgctgaatttaacggcctcaaccggcatttctgatacctcttatagcggttctaaaaccaacgccgcccagtacgacgatagcaacatggggcagaataaaatcggcctgaacttctccctgccgctgtatcaaggcgggatggttaactcgcaggtaaaacaggcgcagtataacttcgtcggcgcaagcgaacagctggaaagcgcgcaccgtagcgtggtgcagaccgtacgttcttcctttaacaatattaacgcctccatcagcagcatcaacgcgtataaacaggcagtcgtttccgcgcaaagttctttggatgcaatggaagccggttactcggtcggtacacgtaccattgttgacgtactggatgccaccaccactctgtatgatgccaagcagcaactggccaacgcgcgttatacctatttgattaatcagttaaatatcaaatatgcgctcggtacgctgaacgagcaggatctgctcgcgcttaacagtacgttgggtaaacctatcccgacgtcgccggaaagcgtagcgccggaaacgccagatcaggatgctgccgcagacggttataatgcccatagcgccgcgccggcagtacagccgaccgccgctcgcgccaacagcaataacggcaatccattccggcattgataagttattcgctggcgctgcgcttatcagacctgtgcccttgtaggtctggtaagcgcggcgctacctgtcataaagccgcgcctgaacgtaagacaacgtaaagatcctgctattccgccgcattctcgccttttctcgcttcaatttcgaccagtcatcctctattctgaacgcatgttgtatttaccactgggtcctggaagacaaatatgaaacggacaaaatccatccatcacgcatcatttcgcaaaagctggagcgcgcggcatttaacgccggtcgccctggcggttacggctgtttttatgctggctggctgtgaaaaaagcgatgacaccgtatcgctgtatcaaaacgctgatgactgttcagcggcgaatccgggcaaaagcgcggagtgtacaaccgcgtataacaatgcgctgaaagaggccgaacgtactgcgcctaagtacgctacacgcgaagattgcgtcgctgagtttggcgaaggtcagtgccagcaagcgcccgcacaggctggcatggcgccggaaaatcaggcgcaggcccaacaatccagcggcagtttctggatgccgcttatggcaggttacatgatggggcgtctgatgggcggcggcgcaggctttgcgcaacagccgctgtttagctcgaaaaacccggccagccctgcatacggcaaatataccgatgcggcaggtaaaaactacggcgcggcgcaaccgggccggacaatgaccgtaccgaaaaccgcgatggcgccgaaacctgccaccacaacaaccgttacccgcggcggttttggcgaatccgtcgccaaacagagcaccatgcagcgtagcgctgccggtacttcaacacgttcgatgggcggctgatacgcatggaaagagtcagtattaccgagcgcccggactggcgcgataaagcgactgaatacgggtttaattttcacactatgtatggtgaaccgtactggtgtgaagacgcttattacaagttaacgctcgcccaggtggaaaaactggaagacgttaccgccgagctgcaccagatgtgcctcaaggtagtagaacgcgtcatcgccagcgatgagctgatgacgaagtttcgtattccaaaacatacctggggttttgttcgccagtcctggcaaacgcaacaaccgtcgctctattcccgcctcgatttggcctgggacggcatcggcgagcctaagctgctcgaaaataatgccgacacgccaacatcgctgtatgaagcggcgttttttcagtggatttggctggaagatcagatcaacgcgggcaatctgccggaaggcagcgatcagtttaatagcctgcaggaaaaactgattgaacgctttgctgaacttcgcgagcagtacggttttcagttgctgcatctcacctgctgtcgcgatacggttgaggatcgcggcaccattcagtatttacaggactgcgcggccgaagcggaaatcgccaccgaatttctctatatcgacgatattggtctgggggaaaaaggccaatttacggatctgcaggatcaggtcattgcgaacctgttcaagctctatccgtgggaatttatgctgcgcgagatgttttccaccaagctggaagatgccggcgtgcgctggctggaaccggcctggaaaagcattatctccaataaagcgttgttgccactgttgtgggagatgttccctgaccatccgaatctgttgcctgcgtatttcgccgaagacgaacatccgccaatggataaatatgtcgtgaaaccgatcttctcccgcgaaggggcgaacgtatcgattattgagaacggtaaaacgatcgaatccgtggaaggcccgtatggcgaagagggtatgatcgtgcaacagttctatccgctgccaaaattcggcgacagttacaccctgattggtagctggctgattaacgatcagcccgccggaattggtatccgtgaagatcgggcgctgatcacccaggatctctcccgcttctatccgcatatttttgtcgaaggatagattctcctgtaagcccgatgcgcgtagcgccatcgggcaatcattcagcgccttatccggcctaccccacctgcaccgacaacatacttatactgcccatctcaataccgtcgaccgggatggtgataggttccttgccgtcccaggcgccaagtacatacagcaaaggtaaaaagtgctccggcgtcgggttcgataaggcccccccttcatgttgcagataattcaccagcgggtgctgttctaccggcccctgccacgtcagattggctttcacaaagtcattaaatgacgccgcccagggatacggtatattgtcaccgtgccaacgcacagtccgcaggttatgaaccacattcccgctggccaccagcatcacgccttcgtcacgcagcgtcgccagtttacggcccacctcaaaatgccatgccgccggtttggtactatcaacactaagctgcaccatcgggatatccgcattcggatacatcttgatcaatacgccccaggagccgtgatcaaatccccacgcttctttatcgagcgcgacgggaacgggagccaacagttcaaccagacgctgcgccagcgcaggcgatccaggggccggataatgcgtgtcatacagcgcctgcggaaaaccgccaaaatcatggagagtttgcggcctttccatcgctgtgacgcccgtcccgcgggtataccaatgcgccgacaccaccactatcgcctgtggtcgcggcagggcttcccccaatcgccgccaggcgcgggtataatcattatcgtccagcacgttcatcgggctgccatgccccaaaaacaatgctggcatacacgttaaagacatgatgttatccttacaggaaagacattttgttaacatcaccatacgctttcttcacagaggaagaactcagataactatgatgaagatcatcagttattttgaaggtcaggttcggacggcaaattgataaggagtaatggatgtcagtaccacttattctgaccttactggcgggcgccgccacctttattggcgcgtttcttggcgttctcggccaaaaaccgtctaaccgcgtgctggctttttcgctgggcttcgccgcagggatcatgctgcttatctcgctgatggagatgctgcccgccgcgcttgataccgaggggatgtcgcctgtactgggctacggaatgtttattatcggcctgttgggctacttcgggctggaccgcctgcttcctcacgctcatccgcaggatctggtgcaaaaaagacagcagccgcttcccggctcgataaaacgcactgcgattttattgacgctcggcattagcctgcacaactttccggaagggatcgccacctttgtcactgccagcagcaatcttgaactgggtttcggcatcgcactggcggtggcgttgcacaatattcctgaaggtctggcggttgccggcccggtttatgccgcgacgggctcaaaacgtaccgcgattttttgggccggtatctccggcatggcggaaattcttggcggcgtactggcgtggctgattttgggcagcctggtttcaccgatcgttatggcggctatcatggcggcagtcgccggcattatggtggcgctctccgtcgatgaactgatgccgctggcaaaagagatcgatcctaacaataaccccagctatggcgtgctttgcggtatgtccatcatggggctcagtctcgtcattttgcagacgataggtatcggttaagagaaacgtcgcgccggatgcaggcctttagccaagcaacatccggctgcccgtcaaggatatgcgctatttctgctcattcatcacgctgtcgccttcgctcgtctggcgaaaacgtttcgttcgcgcttcaagtaatgcatctctgtcctgccgaaacgctctgcaataacgcttcatatggcaaatataccctactaccaccagaacgattaatattatccaataccaggcaataaacatcctttttacccttaaaatttaacatcactaaacatttaacgttaaaattttacatacccttattttgacgtattcatatactggcatatttgtggaacaaataaatgattttgatcatataaatcagtggtgaaacacaataatgaaagaggtattaagcagaaaacaatgtcgataagatcacacttcgtactaatttatattgttcttaaaatatcacactcctactatcgactcactcaggcaattaaaaaatattgatacagaatatactttaaaataagtaacagcatcatgacttatatttaaagaccaatcatttacctcatttattattcataaaaacatagtatattcagaagtattatatttagaagttgtatataaggagatatatccatgtttgaccaataccggaaaacaatacttgccggcgccgtcgcactgacatgcggactcaccgcagccagtacgtttgccgcaggttttcaaccggcacagcccgcagggaaattaggcgcagtcgttgtcgatccttacggaaatgcccctctcaccgcgctggtggaattagatagccatattatttcagacgttaaagttactgtacatggcaaaggggaaaaaggcgttcctgttacttataccgttgggaaagagtctttagaaacctatgacggtattcctatttttggcctttatcagaaatttgccaacaacgtcacggtagaatataaagaaaacggcaaagccatgaaggatgactatgtggtgcagacgtccgccatcgtcaaccattatatggataaccgttctatttcagatcttcagcaaacgaaagttattaaagtcgcgccaggatttgaagatcgcctttatctggtaaatacccatacctttacgccgcagggcgctgaatttcactggcacggcgaaaaagataaaaatgcgggtattcttgatgccggtccggcgggcggtgctttgcctttcgatatcgccccttatacgtttgtggttgacacccagggtgaataccgctggtggctggatcaagataccttctacgacggccacgatatgaatatcaacaaacgcggctacctgatgggtattcgtgaaacgcctcgcggcacctttaccgcggtgcagggccaacactggtacgagtttgacatgatggggcaaattcttgccgatcacaaactgccgcgcgggttcctggatgcgtctcatgaatccatcgaaaccgtgaacggcaccgtactgctgcgcgtcggcaaacgcgattaccgcaaagaagacggcatacatgttcatacgattcgtgaccaaatcattgaggttgataagtctggccgcgtagtagacgtttgggatttaaccaaaatcctcgaccctatgcgtgatgcgctgctcggcgcgctggatgcgggcgcagtatgcgtgaacgtcgatctggcccatgccggacagcaggcgaaactcgaaccggatacgccgtatggcgatgcgcttggcgttggtgccggtcgtaactgggcgcacgtcaactctatcgcttatgacgcgaaagacgactccatcatcctttcttcccgccatcagggtattgtaaaaattggtcgcgataagcaggtgaaatggatactggcaccgtctaaaggctggaataagcagctagccagtaaattgctgaaaccggtagacgatcatggtaagccgttgacctgtgacgaaaacggcaagtgtaaggacaccgatttcgatttcacctatacccaacatacggcatggctttccagcaaaggcacgttaacggtctttgataacggcgatggtcgcggcctggagcaaccggctctaccgaccatgaaatattcccgttttgtcgaatataagatcgatgagaagaaaggcaccgtacaacaagtttgggaatacggtaaagaacgtggatatgatttctatagtcctattacctcggttgttgaatatcaaaaagaccgcgacaccatgttcggctttggcggttctattaacctgttcgacgttggtaaacccacagtcggcaaactgaatgagattgactataaaacgaaagaagtgaaagttgaaattgatgtgctgtcggataaacccaaccagactcactatcgtgcattactggttcatccaacgcaaatgtttaaataaataacgggaaggaattaatatgtcatctaaatggattacctctttatttaaaagcgtagtattaaccgcggcattagtcactccttttgcggcatcggcttttaccgagggcacagattatatggttctggagaaaccgattcctaatgcggataaaacgctgattaaggtatttagctacgcctgccctttctgctacaaatatgacaaagccgtaacaggtccggtttctgataaagtagccgatctcgttacgttcactccgttccacctggaaacaaaaggcgaatatggcaaacaggccagcgaagtatttgcagtcctgatcgccaaagataaagctgccgggatttcgttatttgatgctaaatcacaattcaaaaaagcgaagttcgcctggtatgcggcttaccatgataagaaagagcgctggtcagatgggaaagatccggcggcatttattaaaaccgggctggacgccgcaggcatgagccaggctgattttgaagcggcgctgaaagatcctgccgttcaggagactctggaaaaatggaaagccgcctatgacgttgccaaaattcagggtgttccggcttacgtcgtcaacggcaagtaccttatctataccaaaaacatcaaatccatcgattctatggctgaactcgttcgggaactggccactaaaaaataagcagggaaacgattatggattttattaagggattatggcgagacctacgcgcaagaccagtagatacgctggtgagatggcaggaacagcgctttctgtggctgttaatggccatcgcgatgggagggttaattatcctggcgcactcgttcttccaaatctatctctacatggcgccgtgcgaacagtgtgtttacattcgttacgcgatgtttgtgatggtaattggcggggtgattgcggcgataaatcccaaaaatatcgtgctgaagctgattggctgcatcgcggcgttttatggcagcattatgggcattaagttttctattaagcttaatggtatccatcatgcggtacataatgcggaccccgattcactttttggcgtgcaaggatgttcgactgacccgacctttcctttcaacttaccgttggcggaatgggcaccggagtggtttaaacctaccggagactgcggttatgacgcgcctatcgtccctgatggcgtaacgctcagtagcgtacagcagtggtttgtcgatctctaccagcagtccgaaggctggtatctgcttccgccctggcactttatgaacatggcgcaggcatgtatgttggcctttgggttgtgcctgattctgctgctggtgatgagcggcgcctgggcattgaaactggccagaggcaaataacctgaatagataaaccaaagcagaggtctgcattcaggcctctgcttttctcacaataattttaccattcagcttattcgtcgttctttgaaactgaacaatatggcaccgaaggaatacaaaaaagccgatgacatctcatcggcttttttcaaccatgatccgttcgatcagctggctttgcgctcatgcgcctggcggtaagccaccagatcttcaatcgtgactaccgccatattatgctggcctgcaaacgcgatacactccggcgcgcgcgccatcgtcccatcgtcgttagtcaactcgcacagtacacctgcaggtttaaaaccggccagcgtcatcagatcgatggtcgcctccgtatgacccccgcgcgtcagcacgccgcccgcctgagcgcgcagtgggaaaacgtgccccggacggttaagatcggacggttttgcgccatccttaattgccgcacgcaccgtagtgacacggtcagcggcggaaacgccggtggtcacgccttctgcggcttcaatggtcacggtaaaaccggtgccgtaggcgctggtgttgttttccaccatcattggcaagtcgagctgcttacgacgatcttcagtaatacacaggcaaacaataccgctaccgtgacgaatggttaacgccatctgttctacggtcatcgtctctgcggggaaaatcatatcgccttcgttttcacgatcttcatcatcaagcaccatcacaccgcgtccttcacgcagcgcatccagtgcaagttcaacacgttcaaaaggcgtaccaaaagaggaaagtagcgtctgattcatggtaaaaaaacctcattaacattatggttaccagaatcagggcagtcttaggagtgccgacaagcggcaaaaaaataacgtgagcgggtccatgcccgactggatcgttaccctctcccatccggactttaaccgtcggccccggaattacaccggatctgctgaccttttcgctatggcaaaaagcgctcgcgggctttcaacctgctctccgcgttccgtcacggcgcgccgtgatgagaaatgcgttaaacatcgctgatttaccgccggtggggaatttcgccccgccctgagaataagcgggttaactataacgctattgattaccttcatcaacgcctttactccgtatgacgtcacacaattctggtttatggcgtccacatatcgcactacaataagagctaacacttaccagttcagggaaaccacaatgattgacccgaaaaaaattgagcaaatcgcacgccaggttcatgagtcaatgccgaaaggtattcgcgagttcggggaagatatcgagaaaaaaatccgtcaaacgctgcaatctcagctgacgcgtctcgatctggtgagccgcgaagagtttgatgtccagactcaggtcttgctgcgcacccgggaaaaactggcgctgctggagcaacgcctcagcgaactggaagctcgcgacaagcctgaagaagtaaaacctgcgcccgccatcccgccagtcgatccacaagagtaaaaacgtgaacgggcctgacggcccgctcatataagatctgaataatgtcctgcgcctgtataagggagcctgcattagtgttctaattctaaccttttcgcctgagtcgcctgctggcagtaaagcgcgtaacgcttgcaaaaccagtcgcgatgctcctcgtccatattgccggttaccgcctggatatcaacaggacgcccctccgcctgcattctggcaaaactgcgcgccagaaaatcaaaattatttagtgaatagacgttattgttgttcatcagcataccctccagttattgaattctgttaaggctatatgctttttctaatttcagtatttccctatatgtacggcggttttatacataacgtgcgcaaatttaatgcgcaaaatcacaatattcaccaaagataacgacggataaatcgcttttcggacttaaggagatatgggtcacatgatattgtaacgcaatgaaataacaagcatgaaaattatcacgcgaacatccttctgaaggcggcgacaaggatagaaaatatgaccttatttgcggagtataacagcccctatctgtttgccatcgcgttcgttttctttatcggcgtgctggagatgatttcgctgatttttggccactttctttcaggcgcgctcgacgcccatctcgatcattatgacgccctgtcatccggccctgcgggccaggcgcttcattatctgaatattggacgcgttcccgccctggtcgtcctctgtctattggccggttatttcggcctcttcggtatcctcatccagcatggcgggatcatgctctggcaagcgccgctcagcaatctgctgctggtcccgttgagcattgtcctgtcggtctttgccgtgcattacagcggaaaaatcctcgcgccctggctacccagagatgaaagctccgccctccgggaagaggaatttatcggcggcatggcgattattaccggccacgccgccgtcgccggtacaccttgcgaaggaaaatttaccgataagttcggccagattcactatttactgctggaacccgaaaagggaaaagaatttaaaaaaggagacaaggtgctgattgtctgccgactttccgcaacgcgttatttggctgagcgtaccttctatgtttaattgagaggaacttacataatggatgatgtttttggcatattgccatcatggatgtttaccgccatcgttgcggttatcgtcttactaattatcgggatcatttttgctcgcctctatcgccgcgcatctgcggaacaggcgtttgtccgtaccgggcttggcgggcaaaaagtggtgatgagcggcggcgctattgtgatgccaatctttcacgaaattattccgatcaatatgaataccctaaaacttgaagtcagccgtgctaccgtcgacagcctgatcaccaaagatcgtatgcgcgttgacgtggtcgttgctttcttcgtacgtgtaaaaccctctgttgaaggtattgccaccgccgcacaaacgcttggccagcgaacgctgtcgccggaagatcttcgtatgctggttgaggataaattcgttgacgccttacgcgctaccgcggcccagatgacgatgcatgagctacaggatacgcgtgaaaacttcgttcagggcgtacaaaacaccgttgcggaagatttgtcgaaaaacggcctggagctggaaagtgtctcattaaccaactttaaccaaacgtccaaagagcatttcaatccaaacaatgcctttgatgccgaaggtctgacgaaactgacgcaggaaaccgaacgccgccgtcgtgaacgtaatgaagtggaacaggatgtggaagtggcggtgcgcgaaaagaaccgcgacgcgcttgagcgcaagctggaaatcgagcaacaagaagcctttatgactctggagcaggagcaacaggttaaaacccgcaccgccgaacaaaacgctaaaattgccgcttttgaggccgagcgccatcgtgaagcagaacagacgcgcattcttgctgagcggcagatccaggagacggagatcgaacgtgagcaagcagtacggtccaggaaagttgaggccgagcgtgaagtacgtattaaagagatcgaacagcaacaggtgacagaaatcgccaaccagacgaaatctatcgccattgccgccaaatccgagcagcaatcacaagcagaagcgcgcgccaacgacgcgctggccgatgcggttcgcgcccagcaaaacgtagaaaccacccgccagaccgccgaagcggatcgcgccaagcaggtcgctctgatcgccgcggcgcaggatgcggaaaccaaagcggtcgaactgaccgttcgggcaaaagcagagaaagaagcggcagaattgcaagccgccgccatcatcgaactggcggaagcaacgcgtaaaaaaggtctggcggaagccgaagcgcaacgggcgctgaatgacgctatcaacgtactatctgacgaacaaaccagcctcaaatttaaactagcgctcttacaatcgttgcctgctgttattgagaagtctgttgaaccgatgaaatccatcgacggcattaagattattcaggtcgatggcctcaatcgcggcgcgacggcgggcgacgtcgccgctggcggcgctaacgggggaaacctggcggaacaagcgttatctgccgcgctcacctatcgtacccaggcaccgctgatcgattcgctgttaaacgagattggcatcgctggcggctcgctaaaggcgctgaccacgccgttggtttcatcggcaacggatgagattaatcgcgaagcaacggtaaaagagcaataactccccgctatatctcctgtccctggccataaggccggggatttttttatcttttttccaccttgtctgtacaaagcgttatgaccagcaggccattttgcgtgggcgatccagtaacgcaaaatcggcgggataaagcccttgcgccagacaggccactcaccaacaatcgcgatgtcagcaaggggctgaaacgggaaagcccctcccgaggaaggggctgtaataaggaaagggttatgatgcaccaggtcatcatactgattgttctgttactgataagtttcccagcttactaacagccaatcagaggggggagagatcccctctcacccttattcctttactttaggtcgaaaaaaaagcagcgtcaaccgcgagatacgcgtcgaaacaaaatgtccgacgcaccttcaaaatcagcgcccgcagcgtctgtaacgcctgatgacgcggttttacttctcgctctcggtctggatctttttgatgatattggtcgtggaacaaccatcttcgaagttcagcaccatgacttcgccgccgttggcccagacctcttcgctgcccgcgatctcttccggcttatagtcgccgccttttaccagcagatccggcagaataccggcaatcagtcgttgcggcgtatcctcttcaaaagagacaacccagtcgaccgactccagcgcgcccagcacgatcatacgctgttcgagcggattaaccggacggctgtcgcctttcagacgtttagtcgaggcgtcactattgaccgcaacaatcaggcggtcgcccagtttgcgcgcgttcgccagataagagacgtggcccgcgtgcagaatatcgaaaacgccgttggtcatgaccactttctcgccacgcttacgcgcgctggcgacggcctgtctcaactcctcttcggtcataacgccgaagccggtatccgcgcgtccgcgcactgcgttttccagctcaataggggaaaccgttgacgtcccgagtttacctaccactacgcccgccgccgcattggcgaaataacacgcctcttccagggtatttcccgccgccagcgtcgccgccagcacgccgatcaccgtatcgcccgcaccggtaacatcataaacttcctgcgcctgcgtcggcatatgtagcggcgctttattcggttgcagcagcgtcattccctgttcggaacgcgtgaccaacagcgcggaaaggtcgtaatcggcaatgagcttcatgccgcgttcaaccagttcgtcttcgcttttacatttccccgcgaccgcctcgaattcagaaaggtttggcgtcagcagcgtggcgccgcggtaacgttcaaaatccgttcctttcggatcgatgagcaccggcacgcccgcctggcgcgccagggaaatcatagtctgcacgctggtcagagcgcctttggcataatcggacaacaccagcgcgccgatcgatcccagcgcctggttgatacgctcatgcaacggctgcgggtccaccccctcaaagccttcttcaaaatcaagacgaatgagctgctgattacgtgatagcacgcgcagtttagtaattgtcggatgcgtcggcacagaaacgaagtcgcacttcacattgacctccgccaacgttttgctcagcgcgcgcgcggcgtcatcaatacccgtcaggccgaccagacgggcgttcgctcccagagacgcaatgttcatcgccacgttcgccgcgccgcccggacgttcctcaacggtatttaccttaaccacgggcaccggcgcttccggtgaaatacggcaagtggggccataccaatagcgatccagcattacatcacccacaaccatgacgcctgcacgttcaaacgctggcagatttactttcattcctgtctcctgagagattcaaaatttgcgcgcgataatagcataattcaaacggctaccagccacttccgccagcttgcctgcaccagcgcgcgctctttgctaaaacacgtctgcgccacatgaccgggaagctcctgcaacgccaggtggtgcagttcatcacgcagtgtggtgtaggctaccgtcagcgcctgcgcctcgtgttcatccataatgccgttttgcgccagaagctccaggatgcgcacgttatcagaccagcgcgttaatttaggtttttcatgagcgtagcgcagtaccagatattgcgcgataaactcaatatccgtaataccgccttcatcagctttaatatcaaaacgatcacgatgcttattgccgagatgcgcccgcattttctcgcgcatttcacgcacttcagtctgcaatgtcttgccgtcgcgcgccgtcgtcatgatagtgcggcgcaccgtatcaaactgtgaggtaagctgcgggtcgccatataccacgcgagcgcgtaccaatgcctgatgttcccaggtccaggcttcatgctgctgataatcggcaaacgcgtccgctgaagtcaccagcattcccgccgcgccagaggggcgtagacgcgcatccacctcatacaaaatgccggaggaagtgcgcgtactgaacagatgcatgatgcgctgcgccaggcgcagataaaactgccgcccgtcgatttcgcgttcgccgttggtcatgacgtccatcggacagtcatgcaggaagatgagatccaaatcggaactgtagcccagctcccatccgcccaacttgccataaccgacaaccgcaaacccccgcccctggcgctcgtccagatgcgctggctgaccataacgcgcaaccatttgcgtccacgcctgctgcaccacagcatcaatcatcgcctccgccagccatgtgaggtgatcgcttactttcatcaccggcagcgtaccggcaatatccgccgccgcaatccgcaaaagctgtgcctgtttaaactggcgtaatgcctccagttgttgttcttcgtcctcttccggcacgcgcagcaaatattggcgtaattcgtcgcggtaagcgtcggtagccgtcggctgataaagcgtgccggggtcgagcagttcatcaagcaacaacggataacgcgccagttggctcgctatcattggcgaagcggcgcagagcataatcaggtgtttcagcgcgccgggaaattcgctcagcagctccagataggtggtgcgagtgacaatccccgccagcaacggcgttatccgcgatagcgtaacagcggcgtcttcgcgagaacagacatcagcaagcaggtgcggcatcagttggtccagcacttgccgcccgcgcgggccgatagggcgtttatccagttccttacggaagtcagcgatgagggtcagaacttgtcgccgatcctcatcggctaaatgcgccagcactggcgtcgaatcatcctcctgtagcgcatcctgccatacttcacgccacggctctgaacgttcttcctcctgcggggtatcggcttcatcatcgccaattaattcgttgaatacgcggcgtacattagccatatgatccgtcagttcgccaacaagctgcggccagttctccgccttcattccccaggccagccgcgcccgattcagatcgtcggcaggcaacgtttgcgtctgttcgtcattgatgctttgcagcagattctccagacgacgtagaaaaagataggccacgcgcagttgcgccacgtcattctcaggcagcaaatgcagcgcagcgatagcatccagcgttggcagtaacgaacgcgactgtagcgacggctcgcgcccgccgcggatgagctggaatacctgcacgataaactcaatttcccgaataccgcccgcgccaagtttaatgttgtctttcaaaccgcggcgtcgcacttcgcgggcgatcatccctttcatattacgtagcgactggatgacactgaaatcgatatagcggcggaaaacgaaaggccgcagcatggcgcgtaattcacgagaccaggcgtcgtcgttatcgcccattagccgcgctttcaccatagcgtagcgttcccagtcgcgtccttgctcctgatagtaatcctccagcgcggcaaaactcagtaccagcgggccgctgtcgccaaacggtcgcaggcgcatgtccacccgatagacaaaaccatccattgtgggctgatccagcgctttgatcagccgctgcccgagacgcgtaaaaaactgggcgttatcgagttcacgacgcccgccccgagtctcgccatgttccggccaggcgaaaatcagatcgatatcagacgaaaaattcagttcgccgccgcccagcttgcccatgcctaaaatcaacagcggctgcggaacgccctgcgggttacagggggttccccattcgcggcaacaggcggcatacagccagtcgcgcgcccccacaatgagcgtctccgccagatggctcaactgttgtaaaatagtctcatcgtccaccagcgacagcgtctgcgcccaggcgatgcgtaccatgatgcgacgacgaaaaaacctcagttcacgcatcagcgaggcgtcgtcacagacacctgccaacgcctcctgtaaccagccagcataatgtcgccattcatcagcctgcggcgatgcggattccagttcggcaagccactccggatgcgctatcacgctatccagcgcaaaatcgctaaatgtaagtactgacttcgcctgcacgctaagcgatgtctcagtaaatccttctggtaggcgctcaacaatggtctgccagtactgcgataagggtgaagagagcggcgtcatttaggggatatcctttaaataatgccggatggcggcgtttcgcctgatccggcctacaagtccgcataccgtaagcctgataagcgcagcgtcatcaggcgctttctacggttctgattatcgttttccgctgtgcaaccagaacggctgctggttaatggcctcattacggaaatgttcaatttcaatacgttgtccggtaagaatggcgtgacgcaatccctgccagttttccagccatgcctgcgcgaccatcgcatcataatacccggccagcagtaaaacgctgtcgatatcgcgagtcaaacgcggcaactggtcgcgatacttatcacccagcggttgtccaaaaactttttttaattcagcagcatgacgagaaagatgaatgtcggcgaaacgcttaaaagaatcggccattttggcctgcgccttcgcgtccagaaatggctgccaggctttcgtcaccagccattccgtcaatgccagtttcgccatcgccgtttgcgtactataaacggctgtgacggcggacaccgcggatgtcatcgtcgcttccgcctgggtaagtagatcacgtaagtgagcgctcgctttacgtggaacaatgccaccaaaaagcattaaggcatggcgcactaatcccatagcatccagcacatgttcttccgccgactcgtcgccgcgcagccagagctcttcatggtactgccactgtgacaacgccagatccagcgagacctccagcccttgctctaccgtggctttcgcggcagtccgcagaattgccgttggtgtattctctcgcggcgcattcccctgcgccaggtgataacctcgcgccgccttactcagactgccctgacgcaaaccggtttgcgacagcagttgcttcgccagttttaacacggcgcgcgtatcgccgcgaagcaactcaagctccagctcacaaatcggttcggcaaactcgcccgcttttacgtcgccgagatcgagcgcaatttcaatcctgctgccatcaacgtccagacaccatttttcccggtaaaaatcggtactgaacagcggctgtacgcttgatgccaggccggcgggcaggttaccatccggccagacctccgccggaagttgcgtcagatccagcacgggttcgcttagcgcgacattgtattcgggtcgctggtgcagcccgcccgttacccggccggcaattttcatggtcatttcatagcgcccattttcaccacgaatacgcagccccatatcatggcggcgtagccagttatcaggcgtttcgaagtagatattcagcaactggctgggcgcatgatgctcgccgccgagcgtatgaagatgatttcgcagcgcatctacggcgtcgtgattgacgataaactttaattcgatttcctgagccatggccttgtacttatgggttatgtcacatctgggaagattcttggcgaacttacccgcattatttttgtcagtagatagtattttgcgccaaattgccatgcaacgagcaatttgacgggcgtaaaagtttgacgtagcggcaaaggcgacacagatgattccgattgatgtcgactactttgcgtagcgacactgatgccgttactatcgttccactttctctgacaataacgacagcctgatgccaaaattacgcctgattggactaactttacttgcgcttagcgccaccgccgtctctcatgctgaagagacgcgttacgtttctgatgaactgaatacctgggtccgcagcggtccgggagataattatcgccttgtgggtaccgtcaacgccggcgaggaagtcacgctcttacagagcgatgccaactatggtcaaattaaagacagttctggtcgtactgcctggataccgttaaaagaactgaataccacaccaagcctgcgtacccgcgtgccggatctggaaaatcaggtcaaaacgttgaccgataaactcaacaatattgataccacgtggaatcagcgcaccgccgatatgcagcagaaagtggcgcaaagcgacagcatcatcaacgggctaaaagaagagaaccagaagctgaaaaacgagctgattgtcgcgcagaaaaaagttagcgccgcgaatctgcaactggatgacaaacagcgcaccattattatgcagtggtttatgtatggcggcggcgtattgggtattggcttgctgttagggctggtgctgccgcatatgatcccaagccgtaaacgcaaagaccgctggatgaactaaatcgccttctctgcggcactgtcttatcattagaggatgatcgtttttaaaaggaaagtggcgtgaagatttatctggtcggtggtgcggttcgggatgcgttgttagggctaccggttaaagataaagattgggtcgttgtcggcgccacgccgcaggagatgcttgatgcgggctaccagcaggtaggccgtgattttcctgtgtttctccacccgcaaactcacgaagaatatgcgctggcgcgtaccgagcgtaaatccggttccggctacacgggcttcacctgttatgccgcgccggacgttaccctggaagccgacctccagcgtcgcgatctgaccattaatgctctggcgcgcgacgatgacggccagattatcgacccttaccacgggcgccgggatctggaggcgcgtctactgcgacatgtctctcccgcgtttggcgaagatcccttgcgcgtattgcgcgtggcgcgttttgccgcccgttacgctcatcttagtttccgtatcgccgatgaaacactggcgctaatgcgcgaaatgaccgcggcaggcgagctggaacatctgacgccggaacgggtatggaaagagacggaaaatgcgcttaccacccgtaatccgcaggtttacttccaggtattgcgcgactgcggcgccctgcgcgtcctgtttccggaaatcgacgccctgtttggcgtacccgcgccggcaaagtggcatccggaaattgataccggagttcatacgttgatgacgctgtcgatggccgccatgctcagtccgcagcttgatgttcgtttcgccacgctttgtcatgacctgggcaaaggcttaacgccgaaaaacctctggccgcgccatcatggccacggcccggcgggcgtgaaactggtcgaacagctatgccagcgtttgcgcgtccccaatgacctacgtgatttagctaaactggtcgccgagtaccatgatctgatccacacctttccgatactccagccgaaaacgatcgttaagctgtttgacgccattgatgcatggcgtaaaccgcagcgcgtcgagcagattgcgctgaccagcgaagccgatgtccgtggacgtaccggctttgaagcgtcggattacccgcaggggcgctggctgcgcgaagcctggcaggtggcccaagcggtaccgacgaaagaggtggtggaggccggatttaagggcattgagattcgcgaggagctgacgaagcgacgaattgcagcggtcgccaactggaaagagaagcgctgcccgaaccccgccagctaaacgccatccagcacgataaattgcctgatggcgctgcacttatcagaccgacaaaacagttaggccggacaaggcggtacgccgccatccggcaggtcaatcatcagaagaaaacaacgtaaacggcagccgccaccacaaagcggtaaatcgcaaacggaataaacgagatacgcttaatcagttgcaggaaggtcttgatagcgatcagcgccaccacaaacgccgtcacaaagcccactgcgaacatcggaatatccgctgcggtcaggaatgaccaacttttgtagagatccagaaccgttgcgcccatcatcatcggcacagccagtaagaacgagaactcagaggcggcgtaacggctgacgcccatcagcatcccaccggaaatggtcgctccggaacgcgagaagcccggccacagcgccagacactggaaacagccaatcataaacgcctgacgatacgtcatatcatccagccccggcgcgcgcggttctttcggcttcaggcactcggcggcaatcagcaacagaccgcctaccaccagcgcgtacatcacgttaattgggttaaatagcgacttgatcgtgtcatgaaagactaaccccagcaccaccgccggaatcatgcccagcaggatgtgaatcaacgttaatcgacctttactttcaccttcacgctgtagcgggcggccaaagtgaataccgatgaggccaaacaaccgccgccagaacatcaccacgaccgccagaatagatccaagttgaatcaccacttcgaatgtcttggccgtatcgccttcaaaccccagcagatgacccacaataatcatatggcccgtgctggataccggcaaaaactccgtcaatccttcgaccacacccaaaattgccgctatcagcagcgagtgcatatcgctcatcaataaacccctaaaatgaaaaacactgcaaaaatggatctcgcgttaagaccccatatataaccgtttggtttaaaaaatataaaattatttatttttatttcagattattgccacgctcaataattacccctacgttcgccgcgcgcgcgacggcgccaggcttgctcagtttgatgcgaacccacggagaattgaatcggctaagcagcagatccgccacctcttccgccacgcgctcgaccagagcaaaacgcccgccttcgacatgatttatcaccgtgtcggcgatatccgcataacttagacaatctgcgacatcatcgcttttcgccgacttacggttatcccacgccatttcgatatcgaacaccagtttttgctcgatagtctgttcccagtcgtaaacaccgatagtggtgattaccgaaagttgctctataaatacaatatccatcacgacctgcctgctttttggctaacccggataccacttccggcgaaatgtgcgtattatccacagaaatagtaaataaaacgacactttcaatacggaacagcttatgagtgcaatcgcgcctggaatgatcctcttcgcgtacctctgcggctcaatttccagtgccattctggtttgccgcatcgccgggctgcccgatccgcgagaaagcggctccggcaacccgggcgcgacgaacgtattacgaatcggtggcaagggagcggctgtcgcggtacttatttttgacatccttaaaggcatgttgcccgtctggggcgcgtatgcgttaggcgttacccctttctggctggggcttatcgctatcgccgcctgtctggggcatatctggccggtcttttttggctttaaaggcgggaaaggcgtagcaaccgcgtttggcgccattgcgcccatcggctgggatttaaccggcgtcatggctggcacctggctgctgacggtcctgttaagcggttattcatcgttaggggcgattgtcagcgccttgattgcgccgttttacgtctggtggtttaaaccgcagttcaccttcccggtatcgatgctgtcatgtctcattttgctgcgccatcatgacaacatccagcgtctgtggcgtcgccaggagacgaaaatctggacgaagctgaaaaagaaacgccagaaagattgagctggaactgcgtctggaagagggcctcaaccgtctggggatcggctcacaagggttgaccggcaatagcttggtgatgggcgtacatatcgaatccgccgcgcgtcacccttccaccattggcgtggttaggcgcgattttcggcctgatcttcctggtgctgctgatcgtctccaggctgttgtggatgcccgtcgttttgctgtaaacccgttggggcggcatgatgtcgccccctttctccgcttttacgccgccggcagctcggccagcggccagcgcggacgtaccgttacgccaagatccgccgtaacgcccgccttaaaccgcaccattccggcataggcgatcatcgccccgttgtcagtacaaaactccggacgcgcatagaacacttcgccgcggcgtttttgcatcatttcggcaagcttcgcgcgcagcgtgcggttagcgctgacgccgcccgccatgaccagacgcttaaaaccggtgctttccagcgcgcgcttgcacttgatcatcagcgtatccacgaccgcatcttcaaaagcgcgcgcgatatcagcgcgagtttgttcgtcgccgccattactacgaatggtgttagcggcaaaggttttcagaccggaaaaactaaaatccagccccgggcgatcggtcatcgggcgcggaaagacaaaacgtcccgccgtcccctgcgacgccattttcgacagcatcgggccgccaggataatccagccccaacaatttggcggttttatcaaacgcttcaccggcggcatcgtcaatcgactctcccagcagttcgtactgaccgattccggtcacgctaatgagctgcgtatgtccgccggagaccagtagcgccacaaacgggaattccgggggattatcttccagcattggcgccagcagatgaccttccatatggtgtacaggaatggccggcacattccaggcaaatgccagcgaacgcccgacggttgcgccgaccagcagcgcgccgaccaggcccgggcctgcggtataggccaccgcgtcgatatcgctcgccgtcagaccggcttcttttaatgccgcctgaatcagcggcacggttttacgcacatgatcgcgggaagccagttcaggcactacgccgccgtagtcagcatgtaatttcacctgactatacaattggttggctaacagaccttttttgtcgtcgtaaatagcgatgccggtttcatcgcaggatgtttcaatacccagtacacgcatgacttgttttacctcgctctaataccgcgcagtgtaggtcgaatgcgggtggatgtataccctcagtcccgacttcgtgtatactccctcaccttataaaagtcccgttcaaaaaaggccgcggtgctttacaaagcagcagcaattgcagtaaaattccgcaccattttgaaataagctggcgttgatgccagcggcaaaccgaattaatcaaaggtgagaggcacatgccggtaattaaagtacgtgaaaacgagccgttcgacgtagctctgcgtcgcttcaagcgttcctgcgaaaaagcaggtgttctggcggaagttcgtcgtcgtgagttctatgaaaaaccgacgaccgaacgtaagcgcgctaaagcttctgcagtgaaacgtcacgcgaagaaactggctcgcgaaaacgcacgccgtactcgtctgtactaatcttttgagagcgggctgctctcaattcagatcgagttgtagttgtaaggccgtgcttccgaaaggaatgcgcggcttgttttcgtttatgcattagcatatacacaaaatcattcatgctgcgtccaggcggcaagagagcaagtccccggcgcttacgcaagtcagcgacaggggtgagcaaacgtagccaacactacgcagcctgaagaatgacgtgtataaaaggggcatatggctggacgaatcccacgcgtattcattaatgacctgctggcgagaaccgatatcgtcgatctgatcgacgtgcgcgtaaaactcaagaaacagggcaagaactatcacgcgtgttgtccattccataatgagaaaaccccttctttcaccgtaaacggtgaaaaacagttttatcactgctttggatgcggcgcgcatggcaatgcgatcgactttttaatgaattacgacaaactcgaatttgtcgaaaccgtcgaagaattagcggccatgcataacctggaaattccctatgaagcaggcaccgggcttagccagatagagcgccatcaacggcaaaacctctatcagttgatgaatggtctgaatgacttttatcagcagtcgcttacccatcctgcggcaaaacctgcgcgtgactatctgcaaaagcgcggtctgagcgctgaaattattcagcgtttcgccattggcttcgcgccgccagggtgggataacgcgttaaagcgcttcggtaataacagcgataacaaggcattgttgctggatgccgggatgctggtcaataacgagcagggcagcacttacgatcgtttccgtaatcgggtcatgttccctattcgggacaaacgcggcagggtgattggttttggcggtcgagtactggggaacgacacgccgaaataccttaactctccggaaacggacattttccataaaggccgccagctatatggtctttatgaggctcagcaatatagtgctgaaccgcaacgcttgcttgtggtcgaaggttatatggatgtcgtcgcactagcgcaatacgacattaactatgcggtcgcttcgctgggtacctcaaccacggcagaccatatgcatatgttattccgggcgacgaacaacgtaatttgctgttacgacggcgaccgggctggccgtgatgccgcctggagagcgctggaaacagcaatgccttatatgaccgacggtcggcaggtacgctttatgtttttacctgacggcgaagacccggatacgctggtgcgtaaagaaggcaaggcggcttttgaagcgcggatggagcaggcgcagccgctctctacgtttctgtttaatagcctcctgccgcaggtggatttaagctcgccggatggcagcacgcagttagccgcactggcgctgccgctcattaatcaggtgcctggcgacgcacaccgtattcagttgcgccagacgttggggctgaagttaggcattttcgatgatagtcagcttgatcgtttagtgccaaaacaggcggaaagcggcgtttcccgcccggctccgcagctaaaacgcacgaccatgcgtatactgataggattactggtgcaaaatccggatctcgcgccgttagtgccgcccttagacgcgctggatcagaataagctgcctggacttggcttatttaaagaattggtcaaaacttgtttggctcagccaggtcttactaccggacaacttctggaactctaccgtggcacaaatgatgctgcgacccttgaaaaattatcgatgtgggacgatatagcagataaggcgattgccgaaaagacctttaccgactcactcaaccatatgtttgattcgctgctgcaactgcgacaagaagagctgatcgctcgcgatcgcactcacggtttaagcagcgaagaacgccgagagctctggacgttaaaccaggagctggccagaaaatgaatttaacggcttaaatgccgcatatcgatcgggaagcccccgacagccgcagtgagaggcagcggccaaaatataagtatgccctcgctttaaatgtcgacagctataccgtcgacaccaatcaaacgaataagtgtggataccgtcttatggagcaaaacccgcagtcacagctgaaacttcttgtcacccgtggtaaggagcaaggctatctgacctatgctgaggtcaatgaccatctgccggaagatatcgtcgattcagatcaaattgaagatatcatccaaatgatcaacgacatgggtattcaggtaatggaagaagcgcctgatgccgatgatctgctgctggctgaaaataccaccagcaccgatgaagatgcggaagaagctgctgcacaagttctgtccagtgttgagtctgaaatcggtcgtacgactgacccggtacgcatgtatatgcgtgaaatgggcactgttgaactgttgacccgggaaggcgaaatcgacatcgctaaacgtatcgaagacgggatcaaccaggttcaatgctccgttgccgaatacccggaagccattacctatctgctggaacagtacgatcgcgttgaggctgaagaggctcgtttgtccgatcttatcaccggctttgtcgatccgaacgcggaagaagagatggcgccgaccgcaactcacgtcggttctgaactctcccaggaagacctggatgatgacgaagacgaagatgaagaagacggcgacgatgacgccgccgatgacgacaacagcattgaccctgaactggcacgcgaaaaattcgctgagctgcgcgcgcaatacgtcgttacgcgcgacaccatcaaagcgaaaggccgcagccatgctgccgcgcaggaagagattctgaagctgtctgaagtgttcaaacagttccgtctggtaccgaagcaattcgactatctggtcaacagtatgcgcgtgatgatggatcgcgtgcgtacccaggaacgtctgatcatgaagctctgcgtcgagcagtgcaaaatgccgaagaagaactttatcacgctgtttaccggtaacgaaaccagcgaaacctggttcaacgccgctatcgcgatgaacaaaccgtggtcggaaaaactgcacgatgtcgcggaagaagtgcaacgctgtctgcaaaaactgcggcagattgaagaagagaccggtctgaccatcgaacaggtgaaagacatcaaccgtcgaatgtccatcggggaagcgaaagcccgccgtgcgaagaaagagatggttgaagcgaacttacgtctggttatttctatcgctaagaaatacaccaaccgtggcttgcagttccttgatctgattcaggaaggcaacatcggtctgatgaaagcggtagataagtttgaataccgtcgcggctacaagttctccacctatgcaacctggtggatccgtcaggcgatcacccgttctatcgccgatcaggcgcgcaccatccgtattccggtgcatatgattgagaccatcaacaagctcaaccgtatttctcgccagatgctgcaagagatgggccgcgagccaacgccggaagagctggctgaacggatgctgatgccggaagataaaattcgtaaggtgctgaagattgccaaagagccaatctccatggaaacgccgatcggcgacgatgaagattcgcatctgggtgatttcatcgaggataccaccctcgagctgccgctggactctgccactaccgagagcctgcgtgccgccactcacgacgttttggctggcctgaccgctcgtgaagcgaaagtgctgcgtatgcgtttcggtatcgatatgaacaccgaccacacgctggaagaagtgggtaaacagttcgatgttacccgcgaacgtatccgtcagatcgaagcgaaggcgctgcgtaaactgcgccacccgagccgttctgaagtgctgcgcagcttcctcgacgattaattcgccgcacacgtataaacgccgccgcaaggcggcgtttttttatcaggccatgcgcaagcgccctatttggcctgcagaatttctacacagcgcgagtattcgcgccctcattccccattgctatagcccacgcataatgagcgcttgatccagttcgcgataggcctcgaccagtttttccgttttaattcggtttaagccactgggattcggcaacacccacaccatcgtcgcgccaatggcgatcttttgtttaccccaggcgataccacgctggctgaatccctgttcaaaagcctgtttaccaagcaccgccagcgctgcgggctggtagtcctctattttttcaatcaggttgcgtccgccgctacgtaattcatgcaacttcacctcagtcgcttgtaccgtcggtcgatcgacgagtttcgttaccccgcagcgaaaatccagtaatttttccgcctcttccggtttcaactgtcgatcggtgaaaccggccaaatgaataactttccaaaaacgattcgcgggatgcgcaaacggaaagccggtattcgccgaggagagtcccggattgatgccgcaaaaaaccacccgtagccctggcgccagtatgtccttaaccattattactcctgagcaatacaacgttctttaagtataacgggttgaaaacacattgtttataaaaacagcacccgcacggttacggctggattacagcgtaaagttacattataatccaccgccacggccccttagctcagtggttagagcaggcgactcataatcgcttggtcgctggttcaagtccagcaggggccaccaaattttagctttaaaatcatataattaagccactctaaagagtggcttttttgtttctgacagggctcgccccataccgctatttacgatgccaataggctgccgcacgtaccaggtgtggatcaaaccccttttcaaagcactgacttaaacgttttaccgttttgccttcgccagtaatccagatgaaatagtctgattctggtattgtcagctgcgacaggcgcgtttgcattgcctgttcatcgccgccaacaacatattccacagtaatatccgtcaaatgggcgagataatcgcggtatgccgcatcctgaatgctcaccagcgcggttaccgcagggcgcacaggcagacggctaagcgattccagacgacgacgtagcgcaggcataccggactcatcgcagacataaacctgacaggcatactcttccggcaccaccagcgaaccgcgcggcccgccgatcgtcagtgtatcgccttcacgggcttccattgcccaacggctggctacgccgccatcgtggataaagaaatccagcgccagctcgcgacgcgcctcgtcatacagcggcgtgtaatccctggagaccgggcgaacgccctccccccagataatgccttcctcagtgactgtcggaggcgtaaagcgacagcctggctcagggaaaaaaactttcgtgtgatcgtcaaagcccagggagatgaaaccgtccagcgcctcgccgccaagtacgatccgctgaaatcctgcgctaatacgttctacccgcagaacgatcagctcgcgaaaacgcagctcattacgaacacgctgtgggtagcgtacggatgatgtcgtcattttttgccttcgtgaagtaatacgatatatctaaattaaagttttaaatgataatgattgttaatcagtaaaaatgcaactgttttttgatagtgttctggcaacacatcgctaatcacaacttcaaaataaaacgttataaattaatagattatatcaacaagcgcttttatccttgctaaaaaccatcatttagatataaattagatatatctaaataagcaggaggcaatgatgcaaaatcaacatgaagggtgttgcaaaaaccgggatcatatgcacgatggttgctgcaaagatcgagaacatcagcatgaaggctgccatagcgcgcatcagcatgagaacgccagttgcggcggcgagcaccgtcacggacacggctgtggtcgtcatggacagggcggtggtcgacgtcagcgattttttggccacggggaacttcggctggtcattcttgatatcctgacccgggacgccagccacggctatgaactgattaaagcgatagaaaacctgacggggggcggctatacgccaagcgctggcgtgatctaccctacgctggattttttacaggatcagcaatttatcacgattagcgacgaagaaggcgggcggaaaaaaatcgcgattaccgcgaacggcgcgcaatggcttgatgaaaatcgcgaacacctgacgcatattcaggcgcggctaaaagcccgttgtgtgggcatggagttacgtaaaaatccgcagatgaagcgggcgctggataacttcaaggccgtgctggatctgcggataaaccacagcgatatcaacgacgcgcaaatcaaacgcattatcggcgtgattgatcgcgcggcgctggaaatcgccgaactggattaagcgggctgcgtgtcctcttcgcggacgcggaacacgttaaccagctcttttaaatgtaacgcctgttcgttcagcgacgccgcggcggcaacagactcttccacaaggcaggagttttgttgcgtggcggcgtcaatcaggccaatcgcgctgttaatctgcgaaataccgtcagtttgctcgcggctggcctgcccaatctcacgtaatatcacatccatctcttcgacgttatccaccatgccattaatcagggcgctggctttctccaccaggtgcatcccttcctgagtctgactggttgaatcttcaatcaaattacggatttcactggctgacgaggcgctcttttgcgccaactggcgaacctctccggcgacaacggcaaaaccacgtccatgttcgcccgcgcgcgccgcttcaaccgccgcgttcagcgccagaatattggtctgaaaggcaatggaatcaatgatattgatgatatccgacatacgatttgccgtatcgttaatgacgcgcattttctgcgtcacttgattcatcatctccccattgtttttcactacgctggcggcgccggcagagagtttggtcgcttcactggtatggtcagccgtatttttaaccgtggcggtaatctgttccatcgacgccgccgtttcttcaaccgagctggcctgctcttccgtacgcgccgccaaatcctggttaccggcgacaatttgcgccgccgctgtggagatactttccgaaccgttttgcacttcctgtacgatatccagtagacgcgttttcatcgccattaacgcttgcagtagtacgcctgtttcatctttatagtcggtggtgatatggcgagtcagatcgccatcggcaatcgcctcggcaaagcgtactgcgtcatcaagcggccgggtaatagaacgcacaatataccatcccattacgcctccggcggcgatgcttatcagcgccaaagtgattaacagcgtccgattatttttaaaatcctctttgacctgcacgctcgcttcatgcatctgcgcgtcctgaacagcgataagttcctggactttgtccttatagactttttgcacctgcaccgttctggtcatcatctcctgaatggccgcctgacgattattgctttgaatatctttcaaaatacggaatctggactccaggtattgctggcgcgcttcacggatctcattaatgattttctgtgaatccgcatcgtgactattttccctggaaagctcatccagtagcgccgaaatgcgctggcttatctcactgagttctttctgcgagctctggctccagcgcccctcttcatccagtaacatgagctgctgcgcgatgatgaaatcattaaaattatcgattaacagattggcttttaccgtggtgggataatcattggtaataatgtcctgcatacccgtattagcccgatcaaggctaaacaaagacagagcggaactcaccaccatgagaacaatgaataagccaaaggccataaataattttgaacgtattttaatgttatgcaaaaacatattttctccctgggattgcatatcctcatacaggaagatttatcggcaataatgttactaactttatgatattgatcgctttttatttctgaacattattagtaagtaatttttattgttcacagaaagatgaaccaaaagtgacataaattggcactaataatgaaagaaatacgctaaaaggttaaccatttcttatttattaactgagtttatacctattaataggtaggaaagggagaaggaataaatatcacattatttttaacatcacaggccactggtactctctatggtggcaggcaccgccttctatcagagcgcatccgcccggtaagcttattgctaccgggcggatgtcattaccgttgctacctacaaataaacttaatgcagtaccgtgaccgcatcctccagccggctggcacggtgttttaccattgcggagacttgtgcgctctcttccaccagcgccgcattcttctgggttatgcggttcaactcgtccacggcgcgagtcaggctggaaagcccatctgtctgttcctgcgtcgactggctgatccgtgcgataagcagggtgacattttgcacctgggctacaatgtcatccatggtacggcctgcggcgtgaacctgctcggagcctgactgcacctttgttgcgctggcgtcaattaatttacgaatatcgttcgccgcattagcgctacggctggcaagatgacgtacctcgccagcaaccacggcaaaccctttcccctgctcgcccgctctcgccgcttctaccgccgcattcagcgccaggatattcgtctgaaaagcgatatcgttaattagcgtggtgatcgtcccgatacgttgcgtactgtgagcgatatcatccatcgttttaatcaccgtatccatcgcctcacctccctgagtcgccgcgctactggccgccatggaaagcttatccgcagcggaagccgtctcggaattgagcttcacggactccgccatctggttcatggtcgttaccgtttcctgaacattctccacggtctgacgggtgtgttcgttcagatcattgttacccttcgccagcctttcactgccgtttctgacgctggaaacctgacttgatacgtcattgatcagccagcggcacatcaagccaagctgccccacggccctcagcatcagccccaactcatcgctacgattaaggtgttgtacgctgttgcgttcgccggtcgccactttcagcgcctgcgtcgccacattttcaatgggacgcacaatttgccattcaaatagcgccgtacctgccagcatcgccaacgcgcccaacaacaacgcctgccatgaggcatccgtaccgaacagcgccaacgccagcattacggccattagccccataatactacgcactcgccagcgaacaggcatagcgggcagtttgcccagcaagccctgacgaaccaccaggcctttatgaatacgtttactacaccgcccttcatttagcgcctgatataaaggctcgacggcggcaatctcatcatccgtggcgcgggtacggatcgacatatatcccgtcacacgcccttcacgtatcatcggtaccgcgttggccctcacccaataatggtcgccgtttttacgccggtttttcacaatgccgctccacggttcgccctgttttagggtgtaccacatatctgcgaaggcagctttcggcatatccggatgacgcaccagattatgtggctgcgccagtaactcgtttaactgatagccgctcacctggacaaaagtgtcattggcgtgagtgatatagctttccaggtcggtcgtagacatcagagtggtatcatcatccagcggggtatttagctggctgacgtagggatgagaagacatgatagcgtcctgtgcaggttatctggatgttaatttttcgctcagatgttatttcggcgctaatctatttatctttagttgttaaaattgctctggatcgcaatttgcgattaatccttaatatttgtacgattttcacctcatcctgcgccttattttcattatgaaattgtttagcgtggacaacctttttctttaaaatctgccctggctcacctttttctcacgccgctgctaacgcaacacaccgtaaaccataaaacaagatctgctcaaaatgcatccaattgttaacacatgacattaaatgttgtgtaaatgtgattatccctggtgtttatcccgattttcactatgggcttagacccccgctaatccctgcaatacttaattcagtatcatgtgatacacggccctctggagctcattttgaacaggttaccttccagcgcatcggctttggcctgtagcgcgcacgcactgaatctcatcgagaagcgaacgctaaaccatgaggaaatgaaagcactaaaccgagaggtcattgactactttaaagagcatgtaaatccaggatttctggaataccggaaatctgttaccgccggcggggattacggagccgtagagtggcaagcgggcagtttgaatacgcttgtcgacacccaggggcaggagtttatcgactgtcttggggggtttggcatctttaacgtggggcaccgtaatcctgttgtggtatccgccgtccagaatcaactcgcaaaacaacctctccacagccaggagttacttgaccccttgcgggcgatgctggcaaaaacgctggcggcgctgacaccggggaaactcaagtacagctttttctgtaacagcggcaccgaatccgtcgaagcggcgctaaaactggcaaaagcgtatcagtcgccacgcggcaagtttacctttatcgccaccagcggcgcatttcacggcaaatcattgggcgcgctctccgccacggccaaatccaccttccgcagaccctttatgcctttactgccgggcttccgccatgtgccgtttggcaatatcgacgcgatgagcatggcatttagcgaaggcaaaaaaacgggcgacgagatagcagccgtgattctggagcctattcagggtgaaggcggcgtgatcctgccgccgcagggatacctgacagaggtacgtaagctctgtgacgaattcggcgcgctgatgattctggatgaagtacaaaccggcatggggcgtaccggcaagatgtttgcctgtgagcacgaaaatgtgcagcctgatattctgtgtctggcgaaagccctgggcggcggcgtgatgccgattggcgccaccatcgcgactgaagaggtgttttcggttctgttcgacaatcccttcctgcataccaccacttttggcggtaatccgctggcttgtgctgccgcgctggcgaccattaacgtcctgctggagcaaaatctcccggcccaggcggaacaaaaaggcgatacgctcctggatggttttcgacaacttgcgcgtgaatatcccaatctggtacacgatgcgcgcggcaaaggtatgttgatagccattgaatttgtcgataacgaaacgggctaccgttttgccagtgagatgttccgtcaacgcgtgctggtcgctggtacgctgaataatgcgaaaacaattcgtatcgagccaccgctcacgctaaccattgaactgtgcgaacaggtattgaaatcagcgcgtaatgcgctggcggcaatgcaggtgagcgttgaagaggtttaaaaacgatgccggatggcgctgtgcttatccggcctgttttctccgggtcgcggcctcttttttgaatcccatcacaatcaccacattccccttttcccttttatctcgcgacggctacagtagtaactcatccgaccacataacaataattttacatactggatacgcttatgagctacccatcgctgttcgccccgctcgatctgggctttactactctcagaaaccgcgtgctgatgggatcgatgcacacgggtctggaagaacatcctgatggcgccgagcgcctggcggcattttatgccgagcgcgcgcgacacggcgtagcgttaatcgtcaccggcggtattgcgcccgttccctccggggtcgtgatgaccggcggcgcgatgctgaacgacgccagccaattaacgcctcaccgcgtggtgaccgatgccgtacatgcgcaaggcggtaaaatcgcgctgcaaattctgcacaccggacgttacagctatcagccgcacctggtcgcgccgtcggcaattcaggcgccaatcaaccgctttatgccgcatgaactgacgcatgatgaaatcttgcagttaatcgacgacttcgcgcattgcgcgcaactggcgcgggaagcaggctacgacggcgtagaggtgatgggatcagagggctatctgattaatgaatttctcacccggcgaactaaccatcgcgatgacgagtggggcggcgactataccagccgtatgcgcttcgcggttgaggtagtacgcgcggtacgccagcgggtagggaacgactttattattatctatcgcctgtcgatgctcgatctggtggaaaatggcggcacgttcgacgaaacggtacaactggcgcaagccattgaagccgcaggcgcaagcctaattaataccggcattggctggcatgaggcgcgaatcccgaccatcgccacgccagtaccgcgtggcgcctttagctgggtgacgcggaaactcaaaggtcatgtgtcggttccgctgatcgcgaccaatcgcattaacgatccgcaggtcgccgagacgatcctgacgcgcggcgatgccgatatggtgtcgatggcgcgtcccttccttgccgatgccgaattcctgactaaagcgcaatccggacgcgcagatgagatcaacacctgtatcggctgtaatcaggcctgtctggatcggatcttcatcggcaaagtgacctcctgtctggtgaacccacgcgcctgtcacgaaacccacatgccgatagcgccggccatacgcaaaaagaatctggccgttgtcggcgcaggcccggcggggctggctttcgcgattaacgccgcgtcgcgcggccatcatgtcacgctgtttgacgcccagagtgaaattggcggccagtttactatcgccaggcagatcccgggtaaagaggagttttacgaaacgctgcgctactaccgtcgaatgatcgatgttactggcgttacgctgaaactgagccaacgggtgaacgcagaggatcttcagccgtttgacgaagcgatcctcgcctgcggaatagtaccgcgccgcccgccgatagacggtatcgatcatccaaaagtattgacctacctggaggtattgcgcgataaagcgccggttggtaagcgagtggcgatcattggctgcggcgggatcggttttgacacggccatgtatctgagccagcatggcgaatccaccagccaaaatattgctgaattttgtacggaatggggaattgataccagcctgcaacaggcaggcggtctgcgcccggaaggcccgcgcctggcacgtagtccacggcaaatcgtcatgctgcaacgcaaagccagcaagccgggcgaagggttaggtaaaaccaccggctggatccatcgcgcgacgttactggcgcgcggcgtgaagatgatcccggcggtcagttaccagaagatcgacgacgacggattacatctcttgatcggcggcgaaccgcagttgctggaagtggatcatgtggtgatctgcgccggacaggaacctcgccgcgagctggcggacccgttacgcgccgcaggtaaaacggtacatcttatcggcggatgcgatgtcgcgatggagctggatgcccgacgggcgattgcccagggcatccgactggcgctggagatttaacgactttacctgatggcgctgcgcttatcgggcttacgccgtcataccggttttataggccggtatgacgcttgagcgccttatcgacggtgtccctgcttcaccgctttcaaaataacaaacttattgttggttgctatcgtcgcgcaattaccgaaaatcttcttcagcttgtggaaatagtccagatggcggttcgccacaatatacagttcgccgttgattttcaggcagcggcgggcatgatggaacatctcccaggcgatattatccgtcagcgcatgtttctggtggaacggcgggttgcagaacacagcgttaaaacggaacggctccacgccggagagcgcgttgttgatcataaattcgcagcgttcgaatgcttccggcaggttcgtttctacattcaaacggctggaatctaccgccatcggcgattcatcgacaaatactacgttcgcctgcggatttttcgccagtaagctcaggccaatcaccccattgccgcagccgagatcgacaatctccccgtcgaggttttccggcaaatgctgcataaagaagcgcgcgccgatatccaatccggtacgagaaaacacattcgcgtggttgtgaatcgtccagcctgtatcttccagtttccagcttagcgtttgcggcgcgtcggccagttgcggatgactgaaggtacagttaatcaggcgcgctttcttccacgccagcgtcgtcgtggttgggcccagcactttttcaaacagttccagcgtagaggtatgaatatcacgcgctttcgcgccggcgataatacgcgtttgcgccgtaacgaccttacgcaaagcgcgtaactgctgttccagcaacgccagtgttttcggtactttaatcaataccacgcccggtgcctgcgggtagtcagcggtactgtcgagaaacgttacgctggactccgcgatgccgttatggcgtaaattctctcgcgtacccagttcgcttaaatacgaatcgccaatactgtatggcgaatgctccgccagcgcacagcttagcgcgccaaacgtatcattcaggatcagcaccgggccgcgaatttccgtctcatccaactgttgcagcagatactcatcggccgcctcccacgccagaagcgggttaacatcatccgtttgcggaaaacgtttcagcgtcagtgaacggaaaccgtcgtctacgtggctcattaggcctcctgaatggtaaaattgcggcgttatccctgaaaagggtgcgtgagtatacactttttatcagcaacatggagctttgatgacctcactaacttaccttcaggggtatccggaacatctccttgcccaggtgcgcgccttaatcgccgagcagcgcctgggagcagtgctggaaaaacgttatcccggcgcgcatgattacgctactgacaaagcgctatatcactatactcaggaactgaaaagtcagtttctgcgcaatgcgccgcccatcaataaagtgatgtatgacagcaagatccatgtgctgaaaaatgcgctgggactgcataccgctgtctcgcgcgttcagggcggcaagctcaaggcaaaggcggagatccgcgtcgccaccgtgtttcgcaacgccccggagccattcttacggatgattgtggttcacgaactggcacacctgaaagagaaagatcataacaaagcgttttatcagctctgctgccatatggaaccgcagtaccatcaactggagtttgatacgcgactgtggctgacgcatcaggcgctgtcggcacaataaattctgaaaatgccccttcccccgtatctttttaacggcgtgggcataaaatcggcgcgttcacatttcgctcattgcctgccgccacgtcaaggatgacgatctgtagagggtattttttatccaccgccaacggaaccgcgcaacaaccatgctctcacaatgtgcccgttttatccgccgcctctgttttacacgccgggcgttaacagtggcgtgttttctgcttgtcgcagcaggcgtcgcgcttttctattccaactggcttatcgtcaacgcctcacagcatctgacatggaatggcattcagaccgttcccgcccgcaacgtcgggctggtgttaggcgctaaacccggcaatcggtattttacccggcggattaatactgccgccgcgttgtatcacgccggtaaagtgaagtggctgttagtcagcggcgacaatggcaaaaaagagtacgatgaaccttcggcgatgcagcaggcgctgatagcgaaaggtgtgccggaagcggccattttttgtgattatgccggattctccacgctggactccgtagttcgcgcccggaaagtgtttggcgaaagccgcattacgattatctcgcaagcattccataatcaacgggcgatctggctggcgcaacaatatggcatagacgctatcggcgttaacgcgccggatctgaataaaaggcacggaacctacacacgacttcgggaaaagctggcgcgggttagcgcggtgctggatgccaaaattttgcaccgtcagcctaaatatctgggcgctggcgtcactattggggctgatagcgcacacgggtgcccttctcgccagtaaaatgccagagtgcgtcgcagcgcactggcaagggcggaaaggcgtgctacattgacgaaaaatccctttctggagtccgctgacgtttatgatacgtttcgctgtaattgggactaactggatcacgcgccagtttgtcgacgccgcccatgaaaccggcaaattcaggctcgccgccgtttactcccgtagtcttgaacaggcgcagtctttcgcaaatgattatcccgtcgagcatctgtttacctcgctggaagcgatggcgcaaagcgacgcgattgaggcggtttatatcgccagcccgaattccctgcatttctcccagacgcagcgctttttgcagcataaaaaacatgtcatgtgcgaaaagccgctggcttctaacctggcggaggttgatgccgctatcgcctgcgcgcgcgataatcagcgggtactgtttgaagcctttaaaaccgcctgcctgcccaacttcctgctgctgcgggaatcgttgccgaaaatcggcagaatgcacaaagcattcctaaattactgccagtactcttcacgttatcagcgctatctgaacggtgaaaatccgaatacgtttaatccggccttctccaatggttcgattatggatatcgggtattactgtctggcgtcggcgatcgcgctatggggcgagccgcgcagcgttcaggcgtcggcgaatttattggaaagcggagtagatgcacacggcgtcgtggttatggattacggcgattttagcgtcacgctacagcattccaaagtcagcgactcggtactggccagtgaaattcagggcgagaggggatcgctggtcattgaaaagctgtcggaatgccagaaagtgtgttttgcgccgcgcggcgcgctgatgcaggatctgacccagcctcagcatattaataccatgctgtatgaagccggggcgtttgcccagcttattgaaaaccatgccgtggaacatccggggttgtcgctaagtcgcgccacggcaaaatggctgacagaaatacgccgtcaaaccggggtcatcttcccggcggacgatctgactcatccccttactgcgtaaaattatgtaaatcatatgttacaggccattgactctacgcgtggcctgtcatactttgttacgcgcaaaggggagtaacttcattgccggtcgatcgtcattacgatgtgtgcaaaaccacatccggtcaccgggcagccataaaggaatgcgtcagcgtattcctttattgttgtaagtgagaccttgccgaatggcaaggtctatgcataaaagcaacggctaatgccattcggcgttagccgttttttttttgcatagggagaaataatgaatactgttggtacgccattattatggggtggattcgcggttgttgtggtgataatgctatccatcgacctgttgttgcagggacgccgtggcgcacatgcgatgtcgatgaaacaagcggcaggatggtcaatcctgtgggtaacgctctcgctactgtttaacgccgctttctggtggtatctggctgaaacgcaagggcgcgaagttgctgacccgcaggcattggcgttccttaccggctatctgattgagaagtcgctggccgtagataacgtctttgtctggctgatgctgtttagctatttctccgtccctccggctctgcaacgccgggtgctggtgtatggggttcttggcgcgatcgtgttgcgtactatcatgattttcgccggtacctggcttatcactcagttcgaatggctgctgtatgtgttcggcgccttcctgctgtttaccggcgtaaaaatggcgctggcgaaggaagatgaatccggcattggcgaaaaaccgatggtgcgttggctgcgcgggcatctgcgcatgaccgatacgatcgagaacgagcactttttcgtacgtaaaaacggcctgctgtatgccacgccgctgctgctggtgctgattatggttgagttcagcgatgtgatcttcgccgttgacagtattccggcgatctttgcggtcaccaccgacccgttcatcgtactgacctctaacctgtttgccatcttaggactgcgcgcgatgtacttcctgctgtccggcgtggcggaacgcttctcgatgctgaaatatggtctggcggtcattctggtctttatcggcattaagatgctgatcgtcgacttctaccatattcctatcgcgatttcgctgggcgtagtgtttggcattctgaccattacgctggtgattaacgcctgggttaaccatcagcgcgataagaaactacgagcgcaataatcttttatcggggtaaacctgccccatcaaaaacgcccggcagcgcacacctgccgggcgtttttgtttaacatgtcacaatactgttaatataaagttataaaacatgatcacagcaaaaaatccaggatatttcgcttcccgaaccttcaactttccttatactcaaccaggcaaacactttgttacatcctgaaagatgcgccgtaagagcgtgcaggggatgaccagcaacacaatacaaggaacatgaaatggctacgcaacgagcatcagggctactgcagcgtttagcgcaaggcagtctggttaaacaaattttagtgggtctggtactggggattttactggcatggatttctaagcctgcggcagaagcggttggcttgcttggcaccctgttcgtcggcgccttaaaagcggtcgcccccgttctggtgctgatgctggtaatggcctcgatcgccaaccaccagcacggccaaaaaaccaatattcgccctattctctttctttacctgctaggcaccttttcagccgcgctggcggccgttgtgttcagcttcgccttcccttcaacgctgcatctgtccagtagcgcccaggatatcgtgccgccgtccggcattgtagaagtcttgcgcggtctgctgatgagcatggtgtcgaaccccatcgacgcgctgctgaacgctaactatatcgggattctggtgtgggccgtcggtctgggatttgccctgcgtcatggcaatgaaaccaccaaaaacctcgtgaacgatatgtctaacgccgtgacctttatggtgaaactggtgatccgtttcgcgccagtcggtatttttggtctggtttcatcaacgcttgcaaccaccggcttctctaccctgtggggttatgcgcacctgctggtcgtcttgattggctgtatgctgctggtcgcgctggtggtcaacccgctgttggtattctggaaaattcgtcgcaacccttatccgctggtgttcgcctgcctgcgtgaaagcggcgtttatgccttctttacccgcagctctgccgccaatattccagtgaatatggcgctgtgcgaaaagctgaatctggacagggatacttactccgtttccattccgctgggcgccactatcaatatggccggcgcggcaattaccattacggttctgacgttggcggcagtccatacgttaggcgtcccggtggatctgcctacagcgctgctgctgagcgtggtggcctcgctgtgtgcttgcggcgcctccggcgtggcaggcggttcattgctgctgatcccgctggcgtgcaacatgtttggcatcccgaacgatatcgcgatgcaggtagtagcggtcggctttattatcggcgtattgcaggattcgtgtgaaacggcgctgaactcgtctaccgatgttctgttcactgcggcagcctgccaggcagaggacgaacgtctggcgaataacgccttgcgtagctaagtgattatcgatgccggatggcgtatgccatccggcgtaacgatagatctgaatctcccaatccataggctgtgatggaaagcgaattgatgttcacgcgcaacatcctcgcgtaacgttatatgtagatggcgtctgccacggcgctcggtcagcgtaaagtataaagtgtcagcctgtgtaaatcctctcgccaccctcccttgcgataagcaaaatcaaagctcaacgacgcgtaatttctataacggacttcgttgacctttgttacaattagatgcattttgaatttttgtgtgttagtgcttgcttacttcacaatttaacaaggaatagttcaggccgcgaatttgccgtttccgcaacgctgataaaaactccaactctgttgcggcagtgcaaacctcagatcaccggcgtgacgttaaccgattctccaggaatactgaatggaactactgactcaattgctgaatgccctgtgggctcaggactttgaaacactggccaatccttccatgattggcatgttatattttgtgttatttatgattttgtttctggaaaatgggctgctccctgccgcctttttgcctggcgacagcctgttgatcctggtcggcgtgctgatcgccaaaggcgcgatgggttttccacaaaccattttgctgcttaccgtcgcggccagcctgggttgctgggtgagctatattcagggccgctggctggggaatacccgcaccgtgcaaaactggctctctcatctccccgcacattatcatcaacgcgcccatcaccttttccataaacacggcctgtcggcattattgataggccgttttatcgcgtttgtcagaacactgctgcccaccattgccggcatatccggcctgaataacgcgcgctttcagttcttcaactggatgagcggcttgttgtgggtgcttatcctgacgtcgctgggctatctgctgggcaaaacgcccgtctttatgaaatatgaagatcagttaatgtcatgcctgatgctgctgcccgtggtgctgctcttttttggcctggcgggttcactggtcatgctgtggaaaaagaagtatgggagccggggataacttatgcttaaaccacgcataactgcccgacaactcatttggatcagcgcttttctactgatgctgaccatactcatgatgacgtggtcaacgctgcgtcagcaagagtcgacgctggccattcgcgcggttaaccagggcgccagtatgccagacggcttctcagttctgcatcatctggatgcgaacggcattcattttaaaagcattacgcctaaaaatgacatgttgctcattaccttcgattcccctgcgcaaagcgccgcagcaaaaacagtgcttgatcaaacgttaccacacggttatgtcgtcgctcagcaggacgatgacaacgaaacggtacagtggctgtcccgcttacgggaaagctcacaccgctttggctaatctccaggaatccgaatcatatcactcactttggtgatttcattgtttaatgactatgattaataaagcggtgtttaacccaccgcgttattatcgggatcaccgccccggacaacgggtccgaacataagggaaagttcaggaatgaaataccgcatcgctttggctatcacgctttttacacttagcgccggtagctacgctaattcgctttgtcaggaaaaagagcaggatatacaaaaggaaattagctacgctgaaaagcacaacaatcagcgccgtattgagggtctgaacaaggcgctcagcgaagtacgcgccaattgtactgacagcaagctgcgcgccgagcatcagaaaaagatcgctgagcaaaaagaagaggtagccgaacgccaacgtgatttagccgaggcaaaagcaaaaggcgatgcggataaaatagacaaacgtgaacgtaagctggccgaggctcaggatgagctaaaaaaacttgaggccagagactactaaattaacgccgaatgtaaatactcactcacctggagaaaactatgtcgaaagataacactacggaacatctgcgcgctgagttgaaatccctgaccgatacgcttgaagaagtgctgagctcttcgggcgaaaagtcgaaagaagagttgagtaagattcgtagcaaagccgagcgcgcgctgaaagagagccgttaccgcctgggcgaaacgggtgatgtgattgccaaacagactcgcgtcgccgccgcccgcgccgatgattatgtgcgcgaaaatccctggacaggcgtaggcattggcgccgctgtcggtctggtgttgggcgtactgctgacgcgtcgttaattatggcggactctcgacaggcacaaggaccaggcaaaagcgtactgggtatcgggcagcggattgtcaccattatcgttgagatggtggaaacccggctgcgactggcggtagtagaactggaagaagagaaggcgaacctctttcagcttttgctgatggtaggtcttaccatgctcttcgcggcgtttggcttaatgagcctgatggttctggtcatctgggctatcgatcctcagtaccgtttgaacgcgatgatcgctaccactgttgtgctgttagtgcttgcgctaatcggcggcatctggactttgcgcaaagcgcgtcagtccacgctattgcgccatacgcggcacgaactggctaacgatcggcaaattctggaggacgatcagtcgtgagcagcaaaggcgaacgcgaaaaacgtaaagcgctgcttctcagtcagatccagcagcaacggctggatctgtccgccagccgtcgcgactggctggagaccaccggcgcgtacgatcgcggctggaatacggtgttaagcctgcgctcctgggcgctggtcggtagcagcgtaatggccatctggaccatccgtcatcctaatatgttggtacgctgggcgaaacgcggcctgggtatctggagcgcctggcgcctggtaaaaactaccctccgtcaacaacagctccgcggttaatatcttttcttttatagcatcgcgccatcaggttatcacccgattacacctggtggcgcgatacttttatgcatatagtctctttaccaatcactcaaattttttgaaaaaatttggcaattttccttgctaacaatttctgtatgccacgtttatgattctctccagcgataacaatgacgcgccaaaccgcgtcattgctcatgaaaatagcagcagccgccgagtcggccccctggagaataaaatgaaaaaattagaagatgttggtgtactgatagcgcgtattttaatgccagttctgtttattaccgcaggatggggaaaaattagcggctatgcgggcacacagcagtatatggaagcgatgggcgtaccaggattcctgctgccgctcaccatactgcttgagttcggcggcggtctggcgattctgctgggattcctcacccgcaccactgcgctttttaccgctggttttacgttgctgacggcattgatcttccatagcaattttgcagaaggtgtaaactcgctgatgtttatgaaaaacctgaccattgccggcggattcttattactggcgttaaccgggcctggcgcgttcagccttgaccgtctgctgaataaaaagtggtaagcaatctatactcaattaaaaaagcgagggaatagcgcctcgcttttgtcatctgaaggagagagacatgggacaactgatcgatggcgtctggcacgacacctggtatgacaccaaatcttccggggggaaatttcagcgttcagcgtcggctttccgcaactggcttaccgctgacggcgcgcccggaccttccggcgaaggcggattcgccgcagaaaaagatcgttaccatctgtacgtttcccttgcctgcccctgggcgcatcgcacgctcattttccgtaaactgaaaggtctggagccgtttattccggtttccgtcgtgaatccattgatgctggaaaacggctggacgtttgatgatacttttccggcggccaccggcgataccctctatcagcatgaatttctctaccagttgtatctgcacgccgatccacactacagcggccgcgtcaccgtaccggtcttatgggataaaaaaaatcatactatcgtcagcaacgagtccgccgaaatcattcgtatgtttaactccgccttcgatgggctgggcgctaaagccggggattactatccccccgcgctgcaaagcaaaattgacgagttaaacggctggatttatgacaacgttaataacggcgtttataaagcaggcttcgccaccagccagcaagcgtatgatgaagcggtagaaaaggtgtttactgcgctggcgcgcctggagcagattctcggacagcaccgctatctgacgggcgaccagttgaccgaggcggatatccgcttatggacgaccctggtacgctttgatccggtttacgtgactcatttcaaatgcgacaaataccgaatcagcgactacctgaatctgtacggtttcctgcgcgatatctatcaaataccgggcattgctgaaaccgttaatcttgaccatattcgtcaccactatttccgtagccataaaacgattaaccccacgggtatcatttccatcggaccgtggcaggatctgctcgaacctcacgggcgcgacgtacgctttggctaatttcaggcgtcctccgggacgccttattaataaataccacaaatatttaccaacatttcattcgcggctattcttagtttgattactttaaaaacaagtgattgaaccattattgaggcgaaaatggattggtatttaaaggttttaaaaaattatctgggatttggcggccgcgcgcgacgcaaagagtactggatgtttattctggtcaatatcatctttacctttgtgttgggcctgctggacgccatgcttggctggcaacgcgccgggggtgaaggcgttctgaccaccatttacggcgttctgatctttttaccgtggtgggccgtgcagttccgtcgtctgcatgacactgaccgctccgcatggtggctactgttgctacttatccccattatcggctggcttatcatcatcgcgttcaactgccagaatggtacgccgggcgacaaccgcttcggccccgatccgaaacgtttttcctgatggcggcgcggcgccgcttttaaagcgccgcgcgctatttattttccggcgaatagcttaggtatttcccgcaggcaccaggcttttgcctcccccatactgtcgcgccgccaggccataataatatcgatttcgctggtcgattccgggctgaccacgcgtagccgcccttcggcaatatcctgttccaccatcgaatatggcatagtcgcgacgccaagcccggccagcagcgcctgacgtttatcttcaatcgtgcttaccgtcagacgtggctgcttatccagcagttgcaccgttaataccggccgctcgcgcgcggtatccgctaccgctacgccgcggtatttaacccgcgtcacttccgaaagcggctccggctcctgatgaatagggtggtcaggcgcggcgacatacacattcattaacgaatacaacttacgggagttaatttccgacgacgatcgaaaatgcatatccggggcgataacgatatccgcccgtccctgctcaagccgctcccatgcgccagccagtacttcggtaatcaatgaaagctgcgtattggctttagcggccagccggtcgatcagcggaaaaaaagcaggcgtcggtaccagagcttcagtgaccagcgtcagatgcgtttcccaaccgcgggccaacgcttcagcatccgtcgttaacttgtctgccgcttccagcaatacccgcccgcgttccagcagcatacgtccgacgttggtgaattttgtacgatggccggagcgatcgaacagtacaacgtccaactcttcttccagcttctgcatggtgtaactcagcgcggagggcacccgccccaactcatcagccgctgcggcaaaactgccccggcggtcaatggcgtccatcacacgcaatgcttcaagcgtcagcgctctctctttagccataacgttctcattcaggaaatttgaacataccgggcagaatatctggctaacaatgcagcgtccagccccttaacataaaaggaagtaaagagaggttaataacgatgattacgacccgaaccgccaaacaatgtggacaggcagactacggatggctacaggcccgctataccttctcctttggacactatttcgaccctacactgctgggctacgcgtcgttgcgcgtactgaaccaggaagtgctggcgccgggcgcctcttttcagcctcgaacttatccaaaggtggatattttaaacctgattctggacggcgaagcggaataccgcgacagcgacggcaaccatgtacaggctaaagcgggcgaagcgttgctgctcgccgcgcagccgggcattagctacagcgaacataatctcagcaaagttaagccgttaacccgaatgcaactgtggcttgacgcctgtcctgaacgggaaaacgcgctggtacaaaaaatcccactctcgacggcgcaacaacagcttcttgcctcgcccgacggtgagcaaaacagcttacaactgcgccaacaggtctgggtacatcatattacgctggagaaaggcgaatcgcttaacttccagcttcacgggccgcgcgcctatttgcagtcgattcacggtacgttccacgcgatgacgcacaacgaagaacgcgaggcgttaacctgcggagatggcgcatttattcgtgatgaacctaacattacgctggttgccgatacgccgctgcgcgcattactggtagatttaccggtgtagccagccagaaaaggagtcgcaagatgagcaaaaaatcggcgaagaaacgtcagcccgtggtaaaacctgccgtacaggagacgatgagcgccactgtgccgctgggctatgaagagatgctaaccgaactggaagccatcgtggcggacgccgaagcccggctggcagaagaagaggccgcagcctgaaatcatgccggatggcggcgcaagcgcccgatccggctgataacgggtagacccgataagcgcagcgccatcgggcaacacgctgccccgacgtcatgccggggcgttattattaatgcgctttactggccataatctcgatgatctgcttgtctgtctgctgcattgagcgacacgccagcgaacacaaattcgcaatagattgttcgacattgtgcgccacaatcccttcgtttccggtcaccgccgtatcgtccaacgccatcagtacggctttccacgccgccgacgcgctggtagagactttcatcgcgcagctattcgacgcgccatcgcaaatcatcccgctgacatcaccaatcatactgctgatagccattgcgatagtgtcgtaacgaccatctatcagccacgccatacccgccgccgcgcccatcgccgccgtggttgccgcgcacagagccgacaaacgcggaagctgatggtgaatatagatagcgctcaaatgcgataacattagcgcgcgcgccaggcgctcgtcatcggcgccgacatgttcagcaaccaccatgactggcaccgtggcggtaatcccctggttgccagaaccggagttgctcatcgcgggcaacgtggcgccgcccattctggcgtctgacgccgcgctggtacggatcaaaatcgccgtggagagatctttcgccagcagaccgcgatcgcactgtttggccagcgtcgaaccgatatgcagcccccaggaaccacgcagtccctcctgcgacaacgcgccgtttagcctggccgcatcgagaataaagcgaatagcgtcaaagggcaccgcattcacaaacgccaggatctcttccagcgaggtatgagacagcactcccagtggcgagtttttttcttcttcctgcgcattatcggcctgggtaaataccacacccttgttggtttctatccgcacaatatttgtatgatcgccgacgatcgtgacacatgcccagctatcgccgctatacactttcgcccgtgaaaacaggatatcgttacatggctcctgcaacatcaccgcgacatgtccagcggccagcatcgcttttgcatcggcaacggctttagcggaagcgtcttttaacacctccaacccggctttcgcatcaccgcccaacgcgcccaacgccgcggcgatcggtagccctaccattcccgttcctggaacggtaacacccataccatttttcatcagattaggcgaaacccacgcgtcaatgcgttcaactgtgccgtcaagttcagccgccgccgccgctgccgccagcgccagtgaaattggctcagtacaccccagcgccggttttacttcttcctgtacggccaggataaaactttgccacaatggatttattttagattcaaacataacaacaaccttaatctcaggtatatcaagagaatgccaggaacggagaaacgcatagcagcagaccggtaataataatcaggtacaacgaagcgcctttatatttgtgcaatgcgggaaccttgtagaccaaccatgccggaattaaacagcccaccataccgaagatagggctacaaatagaggtgaagctcagtaccggcgcattgagcacaatggcgctccaggccagcaaaatagcgaaaatcataatgccgcgctgtaccagattttccttaatcttctcggcgggcattttacggcgcaggatattcatcacaatgccttgcgtcgcttcgcggaatcctaaataaacgccaaagaaggcggtcatgacggcaaagatgttcagaattacgctaaccactttgacccagcctgcgccatcgccgctaataaattgcgcggcgatcgccagggcggaaatattctgctcgtaggctttcaccgcttcgtcatgccccatcgccagggtgaaggaaaccgcatagaaaaatacggtaacgaacaggatgccaaacgcaatattcatggcacgcagcgctttatggcgtgcgacctcaatagatttttcgcgtgaacggtaagagatcaccattgggcttaacgtctggataaataaaatcgaggtcagcgtaaatggcagggtaataatggcgtttttaatcagcatggccatcggcggcagcgcgccaatgttatacagatgccacatacccaccatagagacgcccagcgccgccactaccagtagcttggtcagcaccatgccggtggagattttgaacagtaatttttcaccgcgtgaggaaatcgccaccaggatgcagatcagcaccagaccataaaacggactatcggaaagtaatccttccgttacgccgaaagtatgcagataagaggcgctgtcgttagtaattgccgtagaatagacgaacatccagatgacgagcattacaaagtacagcgcgcctaataaaataccccagtttttgcccagatagccgctgatcacgctggggtagtctttacattccggggattccgccagcgtattaataaacagccgctggaacaggtacatggccggatagccaataatagaagagagtaaaaagacccaaagtcccatcaggccaacctggacaggaagaaaaacgatccctgcgccgatcgccatcccgatactcataatgacccaaccggtgtcggtactatcaaatttgatggcttcacgccattcgctttctgtcatccctgcccgacgcgccggggctgatgcgtcgaggattacgctggtattactagccgattccataaaattctcgctcaatgtgtaggtagaggtttttttatttttcgtgccgcagcaaggcgatatgcagaacgtgaggtgcaggtactttcttgtaataagaaaatcatacgcgcacgataagagaaaaacttaccaataaaacgcctgcatttcttgtgggttaagaattattttctatttactatttatttaatattgttattttctctatttgacgcgtatcacaacaaaaaagggcgcacgttggtgcgcccttttctcagcttctgtcttctgcgttatcccatagcctgctcacgctgcgcctgtcgggcctatccacaaacgactttaatcgccagaccgccgcgcgacgtctcgcgatatttgtcgttcatgtctttacccgtttcgtacatggtttcgatcactttatcgagcgaaacccgcggctcagaggtacggcgtagcgccattcgcgccgcattcaccgctttaacggcgttaatcgcattacgttcaatacaagggatttgtacctgacccgccaccgggtcacaggtgaggccaaggttatgctccatcgcaatttccgccgcaatacagacctgcgcagggctgccgcccagcagttctgtcagccccgccgccgccatcgaacacgcgacgccaacctcaccctgacaccccacttccgcgccggatatcgaggcgttcatcttgtacagcatgccaatcgcccccgacgacagcagatagcgggcgatagagttggcattgaccgggcgacggaatttgtcgtaataggccagcaccgcgggaataatgccgcacgcgccgttggtcggcgcggtgaccactcgcccgcccgccgcgttctcttcgctcacggccagggcgaacatgttaatccagtcaatgacgttcatcggatcgcgggagagattatcgctggagaccagcagacgccgtaacgctaccgcgcggcgtggaacgttcagcggccccggcagcacgccctcagtattcatgccacgttcaattccggtcgccatcacctgccagatgcgggcaaagccagcgtcaatctgctctttgctccgcaacgccagttcattttgcatcatcaggccggaaaccgagagcccctgtctttcacacagcgtcaacagttcgctggcggaatgaaaatcatacggcaccgatttttctacgtcgtgcgactgaccaaaacgctcctcttcgacaataaagccgccgccaatagagtaatacgttttgtgtaaaagcggcgcttgtccgttccaggcggtaatacgcataccgttttcatggcgcgccagggtttcagcgtgaaagagaatactgtcggcgacgggaaaatccaccacatgcgcgccacccgccaccgataaacggctgctgcgggcaacctcctggataaacgccggaatgctatcaatattgacatcctgcggcgtattgcccgccaggcccataatgatggcggtatcggtcgcgtggcctttgcccgtcagcgatagcgatccgtaaagatcaaccgtgatgcgcgtcgttcgcggcaggtcgccgctgtcgatcagccgatcgataaaacattttcctgcattcattggccctacggtatgggagcttgaaggtccaatgccaatcttaaaaatatcaaatgcgctaatcatatctccccctaagattaccgttcagtgaagatccgtcgcggggcgatccacacgatcgccccgttcacgttacatcgcctgagtaaaggtgcgcgaaataacgtcctgttgctgctcacgcgtcagcgcattgaagcgcacggcatagccggaaacgcggatcgtcaggttcgggtagttttccggatgttcaatcgcatccagcaacatttcacggttcatgacattgacgttcagatgctgcccgccttctacctgtgcttcatgatggaaatagccgtccagcaggccgacaagattggttttccgcaccgcatcttctttcccgagcgccgcaggcacaatcgagaaggtgtacgaaataccgtctttggcgtaggtaaacggcagtttcgccaccgacgtcagcgaggccactgcccctttgcggtcacgaccatgcatcgggttcgcccccggcgcgaacggcgttccggcgcggcgtccatccggcgtattgccggtcttctgcccgtacacgacgttcgaggtgatggtcaaaatggactgcgtcggcaccgcattgcgatacgtcggcaacacgctaattttttgcataaagcgtttcaccaggtcgcaggcgatgctgtccacgcgctcatcgttgttgccgtactgcggatactcgccttcaatagcaaagtcgatggcaaggccattttcgtcgcgaatcggcttcacctgagcgtacctgatggcggacagggaatccgccgccaccgacagtccggcgatgccgcacgccatcgtccgatacacatcacggtcgtgcagcgccatcagcgaagcttcatagctgtacttatcgtgcatgtagtgaatgatgttcagcgcgctaatgtactgcaccgccagccagtccataaagtggtcgaggctctccattaccgcgtcgtaatccagcacctcatccattaatggcgcggttttcggcccgacctggattttcagtttctcatcaacgccgccattgatagcgtacagcaacgttttggcaaggttggcgcgcgcgccgaagaactgcatctgcttaccgatgaccatcgggctgacgcaacaagcgatggcgtaatcgtcgctgttaaagtcggtacgcattaaatcgtcgttttcatactgcaaagatgaggtcacgatggagacctgcgcagcatatttcttgaatgccaccggcaacgcttctgaccacagtatggtcaggttcggctccggcgctggtcccatcgtgtgcagggtatgcagataacggaaggagtttttcgtcaccagagtgcggccatcgagccccatccctccaataacttcggtggcccagatcggatcgccggaaaagagcgaatcaaattccggcgtgcgcaggaagcgcaccatgcggatcttcatgatgaaatggtcgatcagctcctgcgcctgctgctctgtcagaaggcccgcgttgaaatcgcgctcaatgtagatatcaaggaacgacgcggttcttcccagcgacattgcaccgccattttgcgattttaccgctgccaggtaggcgaagtagagccactgtaccgcttcctgcgcgttccgcgccgggcgggagatatcatagccgtatttcgccgccatctcctgcatttgcagcagcgcgcgacggtgctccgccaactcctcacgcaggcgaatcgtcgcctcaagattctgtccctgctccagattcgactgcaggtcggcgaattgcagctcgcgttcgcgtaccagataacggatgccatacagcgcgacgcgacgataatcgccaataatgcgcccgcgaccataaccatccggcaaaccggttaatacgccggatttacggcagcgcagcatatccggcgagtaaacatcgaatacgccctgattatgggttttccgcaggtcggtaaaggtatattcaaaatcggcgtccatttcgcggccataggcgtggaatgaacttttgatcatgttaacgccgccaaacggatgcaaagcgcgtttaagcggcttatccgtttgtaaaccgacgattttttccagctctttttcaatataccccgcatcgtgcgcggtaatcgtcgtcgcgatgttggtatcgaaatccaccggcgcatgggtcgcgttctcgatacgtattcccgccatcaccttttcccacagcgccgtggtcgctggcgtcgcgtcggcgagaaaagattcatccccctcatagggcgtatagttatgctgaataaaatcacggacattaatttcttctttccagtccgtacctttaaaatcacgccatgcttcggcatacagcatatcgctggtatcgatatttaccttcatgaaaaataatctctctacagaacagccgttaagttatgcaaattccactggtgcttccacgttgcctaaatgaatggcatcaagggcaatcattttctcttcattcgtgggaataacagcgcaaataacctgagaagggttagcggaaataatgcgctcgccgtgagaattcggctgcttattcatttcaacgtctaacgtaagccccagtacgcccaaatgttcaatgaccaactggcgaattaatactgaattttcaccaataccgccggtaaaaataatgccatccagccgatgtaacgatgccgcgtgtccggcaatatgacgggcgatacggtggacaaacgtttttatcgctaaccgggcgcgctcatgtccttcgtgccaggctttttccaggactctaaggtcggatgacaacccggagatgccgagcaaaccggactctttattcaccactcgctccagatcgctcaacgtctgcccggtttctttggctatccacgccatcgcgccgaaatcaacgtcgccactgcgagtgcccatcatcagcccctcaagcggcgtcatccccattgaggtatccacgctctgaccattgcgtaccgcgcagatagacgccccattgcccagatgcgcgacaatcagacccgagtttttttcatcgaggtcaagcagttcatacgcgcgccgcgaaacatagcgatgcgacgtaccgtgaaagccgtagcgacgcacacccaggctggaaaaatattcccacggcaatccgtacaaataggcttccggcgccagcgtctggtggaaactggtatcaaataccgccacctgacgcacggccgggaaaaggtgccgcgccgcgtcaatgccgcttaaattagcgtaattatgcagcggcgctaaaggtgatacccgacgaatattatcgataatctcatcggtaataatgacggactgcgtaaatagctctccaccgtgcgcgatacggtgaccaattaatgccacgctatccgttaaatcacgtttttccagctcaaaggcaatggcttttaacgcgtcctcataattagagtgcgagaggtttatcggcttatcgccattaatagataaaaaggcgttttcagtattcattccatctgctattcccgccattaaaacatcacaggtagcgaaatccagtacagagaatttgatagaagatgatccgcaattaatgaccagaacgaccggaaattcattcatgtagtgcctccgtcgatgtcagcctgcgtccacgccctggggcggaacgcaggctaaacgtgaggattagaacaatttgtagacaatattcaggatggtcagcagaccaatcagggtgacgaacacgttatccagacgaccacggtacttcgccagcgacggcgctttacgaatggcgtacatcggcagcaggcataacagcgaggcgataatcggcgcgcccatcgcttcaatcaggtccagaatgttcgggtttgcgtaagctacgacccaggtagaccccataatgaagatcatgctgatggtgttaagcttgcccatagagactttggttttatcgcctttataaccgaatttcagcaccaggccgttcagcccttccagcgtccccaggtagtgaccgaagaaagatttgaaaatagcaaccagcgcgatgatagacgcgccatactccagcaccgttgcaaaagtagattttgtccccgacaaagaggcgaaatggttagccaggtaggaaagtaccggaatgttctgcgctttcgcatccgccatgttctgcggggagagcgtaaacagacagctaaaggcgaagaacatcaccacggcgaccatcagcatactggcgcgcgagatgatctgtgaacatttacgctcggtaaattcgcggccaaactctttctcatactcttcacgcttagacaccacgaaggaagagacgatgggcgaaaagttaaaggagaacaccatgatagagatgcccagccacaccgtaaccagtatgccatcgtgcccagtcagcgcgatattactgagatcaacctgatcgataaccgccgagttccagtaaggaatcagcgataatgagattagcaccagactggcgataaacggccataccaggtaactcatcaccttaaccatcagatctttaccaaaccagatcacaaaggccatcagcagcagcaagaacagcgccacgaaaccgcgattcaacgctggcatctgcaactggttttcccaaaacgtcatgaacgtgttagtgatggtgacgccataaatccacagcagcggacaaatcgcaaagaagtaaaggaacgtgataactaccccgcccgttttaccaaagtgctcttcgaccgtttccgtaatattgccggacggattagatccggataaacacagacgcgccagcgcccggtgacaatagaacgcaatggggtaagctaaaaccagcatcagcagaatggggataagcccaccaaacccggcgcggatagggaaaaacagcaccccggcgccgatggcggtaccaaataaacccagcgtccacgtcgtgtccgatttacgccatgacgactgttttgcctggctggatacaatgctatcagtagtactcatatcctatcctcacgaaaagattaagcgtcaactaaacccgtaatttgtgatacccgagaaagatcgatattgccgccagaaataatactgaccgtttttctgttctgaatatggctatctaatttcccacttaatagtgcggcgcaagccagagcgccagcgccttcagtaataaccttattgcgctgaattaaagcgatcatgctgttacgaatttcatcttcgctaaccaggacaatgtcatcgactaattcacgaacgatttcataggttaaattacccgggcgggagacatcacaaccatccgccagggtgccggtcgttcggtgcgtggttatttcgccagcgtaataagacgccgccataccgtgaacattttcggcctgtacgccgataactttaatggtcgggttaatcgatttaatcgcaatggcaatacctgcaattaaaccgccgccgccaataggcacgatgacattatcgacatcgtacagatcttccataatttccagaccaatagtgccctgtccggcaatgacttttggatcgtcgtaaggcggaataaaaatgcggccttcggtttcgacaatttcactcaccttagcgatggtgtcattgaagttgtcaccgtggagcaccacttccgccgaataatcacaggtggccgccacttttgactttggcgcgcccttcggcatcacgactttgccgtcaatacccagcattgcgcaagaaagagaaacgccctgtgcatgattacctgcggaacaggccacgacgcctttacgtttttccgcctccgttaacgagctaagtttgttaaaagcgccacgaattttaaatgaacccgtacgctgcatattttcaaacttgagaaatatttcgcctttgcaacgttcactaaaatagttagagcgaggcattcccgttttatatatcttccccgccagtctttttttcgcttcgaggatatcttcaattgcaaccgggagatcgtatgtaatgtgcattataacctcttaacctgggtattaaaaataagttaccgttgcccactgttcaaaagaaacaggtgacgtcaatttcgctaaatatgtttattccatatcattcaatttctattaactgcctgcgtctgcatccattatatgatgaatattgtttagccaattctactaatactgaagcggcttttttgatacgataatttttagaccataccgccgcataacgtgcgacgggtaacgtgtcttttatgggtatcgtgataaattgattagagccaaaaggcgtggtcatatcgcagggaataacagttaagaaatcagcattgagaacaagattatatattgtgacaacggaatctgttttaacaatgttttcgatgctgatgccatttcgttgtagagtggtgagtaattcgctgtagtagcccatattcgtttgcggcaacacccactgttcgtcctttaacgattccagtgtgatggtgccggtgcatgttcgggacttgctggctaccaggacaaactctgattcaaacagcggctcgacatgcagatcctgtagttgcatttcattactgagcgtaccgatagcaaagtccagccgcccgtcgcgcagggccggcaggaatgaagagagctgggcttcgtacatggatacctgcgcttttggaaatacctctttgaacttatgaatcatatcggacatgaaggtaaagccaatcagcgaaggaaaaccaaacgagacgtcgacaacggtattgcacgtcatactgttcatctcgttgatcatgtttttcatttcgcgggtgatagattcagaccaggaaagcagtacctgtcccgcttcggtcaacgtaacgccggtatttttgcgtacaattagctcaacgccaaaataggcctcaacatcgctaatgattttactgacggcgggttgggttaaccctaacgattttgcggcagaaccgatagaaccacttctaatgacttcctgaaagaccaccaaatgctgtgttttagggagaacaagagtattcatatctaccgctctgaaataacattgtgaacggcaggaagtgtagcaaattaaatcttaaaggttatgtgcgaccactcacaaattaacttaccgcaatttttacatggtctttattaaataaagaaaacctattacttcaattagttacaaaaataaaacagcaacttagcctgatttcaatcaaaaaatagggtcgggataacgatatattatggcgataaccagcctattttatctcctattttcgacatcccatgaagacgatatttcaatcaattacgggacattttatcggcaattccagcgttaaatttaaagcgtaatttctcaaatttaagtataaaccgaaggtaaatgcgcttaaaaaccgttacgcgtcacatttttttaccttatttgtttgtaaagaaacatttaataaaattttaaccaaaatatttcatacatttaattttcatttacaacaaataatttacaccgctttcttgctgtttttcaggatgtaattttgtgaaagaaatcgattgcttttcacttcaactaaaaagagcgcaatccatagcgttttgtgtttctcatcacaaaaacgaataatattatgtcaccacggctgtcaattaattgccggatagtgacgctggcgtcttctgcaacctctatacccttcaccggccagataagcaaaaacccgccgaagcgggttttatgaagagatgaaactgaccgataagccgctttcttttgggtatagcgtcgtggacagtcattcatcctgccgccctgtaaaagcaaaaacccgccgaagcgggttttatgaagaggtgaaactgaccgataagccgggttctgtcgtggacagtcattcatctaggccagcaatcgctcactggctcaagcagcctacccgggttcagtacgggccgtaccttatgaacccctatttggccttgctccgggtggagtttaccgtgccacggactgttaccagccgcgcggtgcgctcttaccgcaccctttcacccttacctgatcccacttgcgtgggccatcggcggtttgctctctgttgcactggtcgtaggtttcccccccaggcgttacctggcaccctgccctatggagcccggactttcctcccctccgcccgtctccccgaaaggacgacgacgaagcggcgactgtctggtcagcttcggcgcgcagtatagagggttcgcgcgactttgtcaccctgcgctgcgcattcctatcgccagagcggcagcaacatttctggatgcccgataaatattgtcaaaagcgccccgaaaagcctcctccagcgtcacgatgcgcgtgagtacgctaaagacagcgtcgatgccataatgatgcactatccctacatcgtgcgtcaggctgccggcaatgccaatcactggcttatgatattttttcgccacattcgcgacgccaatcggcactttaccgcgaatactttggctatcaatccgcccttctcccgtcaccaccagcgtacagtcgtggatatgctcctccaggttcagtgccgccgtgacaatttcgatcccgctgcgtaattccgcaccgagaaaagccattaacgccgcccccataccgcctgccgcgcctgcgccgggcgccgcctttacgtcgacattcagcgatttttttatgatgtcggcatagtgagcaagatttctgtccagctcaacaatgttctcttcggtcgcgcctttctgcggcccaaaaattcgtgatgcgccgttgtcgccgatcagaggattagatacatcgcatgcgacacgaatcgcgcagagttttaaacggggatcgagctctgaaatatcaatgtcgcttagacaatgaaggcttccgccaccgtaaccgatatccgcgccgtttgcatcgcgcagttttgcgcctaacgcctgcatcatccctgcgccgccgtcatttgtcgcgctgccgccaatgccgataatgatattgcttgcgccgctttccagcgcctgcaatatcagctcccccgttccccgcgaggtagtaatcaaagggttgcgtttttctggtggaaccagcgccagtccgctggccgccgccatttcaataaacgcggttttaccatccccggacattccccagcaggctttcactttttcacccaacggcccggtcacccatgcggtgcgttcaacgccctgcgtcgcggcaatcatggcttcgaccgttccttcgccgccatcggcaaccggaacagagacatattgcgcatcggggaaaatttcccgaaatcctttttctatcgcctgcgctacctcggcggcagaaaggctttctttgtaggagtcgggggcaattacgattttcatagtggtagcctgttactgcacaacgccggatggcgtttcacttatccagcctgaaattcaggcccggatcgctacacgccatccgggcacaacgtcgttagcgagtgacttccactttcgccagtttttcgtagtagcacgccagcgcgctatggtcgtcattaccgtgtccatccgcgcgtaacgcctgcatcatttccataacggcggcggtcagcgggagctgcgcgccaacgccgtgggaggtatccagcgcattcgccagatctttaatgtgcagatcgatacggaaacctggcttaaagtttctgtccatgaccatcggcgctttcgcatccagtaccgtgctgccagccagaccgccgcgaatcgcctgatagaccagatccgggttgacgcccgctttagtcgccagcgtcagcgcttcagacatggcggcgatattcaacgccacgatcacctggttagccagttttgtgacgttgcctgcgccgatatcgccagtatgcaccacggaacccgccatcgctttcatcaggtcgtagtacttgtcgaaaatggctttatcgccccccaccatcaccgacaacgtgccatcaatcgccttcggctcgccgccgctgaccggcgcatccaacatctcaacgcccttcgccttcagcgcatcgctgatttcacggcttgccagcggcgcgatagaactcatatcaatcaatacggttcccggcttcgcgccttcgatgataccgttctcgcccagcgcaacctctttcacatgcggagagttaggcagcatcgtgatgatgacgtcacactgttcagcgatcgccttcgccgtagaggccgtttccgcgcctgcggcaatgacgtcggcaatcgcttcaggattacgatcggacaccaccagcgaataccctgctttcagtaagtttttgctcatgggcttacccatgatgcctaagccaataaagccaactttcatcgtcatagcgttctctctttccataccaggattattttttaaaggtgtcggcaagcttctgcgtgctggcgcggaatgcgcctaaatcgctgccaacggcgacaaaggtcgcaccccattccagataacggcgggcatccgcctctaccggcgccagaatgccgcacggtttaccgtgcgctttagcgcgggcgaaaatatgttgaatcgtctgctgcacgtcagggtgagaagcattgccgagatgacccagcgcggcggccaaatcgcttgggccgacaaaaatgccatcaacgccttccgttgcggcgatggcatcaacattgtcgacacccaactggctttcgatttgaacaataatggtgatgtttttgttcgactgcgcaaagtaatcaggcaccgtaccgaacatattcgcgcggtgagaaacggagacgccgcgaatgccttccggcgggtaacgcgtcgaggcgacggcgcgagccgcttcctcttgcgtttcaacaaaggggatcaggaaattataaaacccaatatccagcatccgtttgataatgaccggttcattggttggcacacgtaccacaggcgcgctggcgctgcctttcaatgccattaactgcggaattaaggtggtcacatcgttcggcgcatgttcgccatccagcaccagccagtcaaatcccgccagaccgagaacttcggtggtgattgggcttgccagtgcagaccagcagccaatctgtacctgttgcgccgccagcgccgctttaaacttattcgggaaaatagcgttattcatcgcttataccttcgcttatttctttaattctctacatgtgatgccgccaccataacttatagcaacgacaataaaatgcttatctgaaatcagaatgggtctccgcattctatttctaatgtggtacacatcctgtagcacaatataccgttctgatatctttatcgtcttttattattatcatggtattttcaaataactcgtcagatacactgaattcgccattcagtataaacagcctatggcggataatcattgtgcaaacgctcattaaaaagggattatttaacgcttatttttgagcatacgcccatgatactgggcgctaatgcacacatttacgctttacccggcctacataaaaaatttcataatttgcggtgatctggatcacattcttatatttatactcctgtcattcttatttcattatgcatgaactttatttcttatattgagatttaacgatttaaccataaccaaaatagataatcctatttctatcatccaggctggagaatgttgaacaatggccaatatcgaaattcgccaggaatcgccatcggcgttttatataaaagtacatgaaaccgataatgtcgcaattattgttaatgaccacggtcttaaagccggaacacgttttccggatggcctggaactgactgaacatattccgcaaggccataaagttgctctgacggatatccccgctcacggcgaaatcatccgttatggcgaagtcatcggttatgcggtacgcgacatcccgcgcggaagctggatcgacgagtcgctggttgaactgccaaaagcgccgccgctgaatacgctaccgctggcgaccaaagtaccggaaccgctgccgccgctggaaggctatacgtttgagggctatcgtaacgccgatggcagcgtcggcaccaaaaatctgcttggcattaccaccagcgtgcactgtgtggcgggcgtggtcgattatgtggtgaaagtgattgagcgcgatctcctgcccaaatacccgaatgtcgatggcgttgtagggctaaaccatctgtacggctgcggcgtggcaatcaacgcgccggcggcggtcgtgccgattcgcacgattcataatatcgcgctcaaccccaattttggcggcgaagtgatggtgattggcctcggttgcgaaaaactgcagccggaacggctgctggaaggcaccgaggatgttcccgccatcgccgttgaaagcgccagtattgtgcgtttacaggacgagcagcatgtcggctttaaatcaatggtcgacgatattttgcgggtcgccgaacgccatctgacgaaactgaaccagcgccagcgcgaaacctgcccggcctccgagctggtcgtcgggatgcagtgtggcggcagcgatgcgttttctggcgtcacggcaaacccggcggtgggttatgcttccgatctgctggtacgctgcggcgcgaccgtcatgttctcggaggtcaccgaagtgcgcgatgccattcatcttctgacgccgcgcgccatcaacgaagccgtgggtaaacgcctgctggatgaaatggcctggtacgataactatcttgatatggggaaaaccgatcgcagcgctaacccgtcccctggcaacaaaaaaggcggcctggcgaacgtcgtggaaaaagcgttgggctctatcgctaaatcgggtaagagcgccattgtcgaagtattatcgccgggccagcgccccaccaaacgcggcctgatttacgccgcgacgcccgccagcgatttcgtctgcggcacgcagcaggtcgcttccggcattaccgtacaggtctttaccaccggacgcggcacgccgtacgggctgatggcggtgccggtcattaaaatggcgacgcgtaccgagctggcgaaccgctggtatgacttaatggatatcaatgcaggcaccatcgccacgggtgaagagacaatcgaagatgtgggctggaagctatttcactttattctcgatgtcgccagcggccggaaaaagactttctcagatcaatggggattgcataaccagctggcagtgtttaaccccgcacctgtgacctgatccagtcagtacccttctccgaccagggtataaccgcataatctgtagaccgggtaagcgccagcgctacccggtattttttcgcccttagtctgtagcctgaagtatgtctgcccgacatgctttttttactcctgactttcgataacttccattttatttcgaaactttcatttatcagatcaaaatcacaaaaaaacattccgaaagcctataaattctttcaaagaaaacaaacgaaagatttcggaggaaggatgtttatcatttcaggcagaacaatgctaaagaaggcgcagcaggaaggctatgctgtgccggcgtttaacatccacaacctggagacattgcaagtggtggtggaaaccgccgcagaattgcgctctccgctgattgtcgccggtacgccaggcacctttagctacgcaggcgtcggtaatatcgtggccatcgccgcagaactggcgaaaagctggaaccatcctctcgcggtacatctcgatcatcatgaaaaactggccgacatcaaaatgaaagtcgccgccggggtacgctcggtcatgatcgacgggtcgcatttcccctttgccgacaatattgcgctggtgaaaagtgtggttgattactgtcatcgctacgatgtcagcgttgaagctgaacttgggcgtctcggcgggcaggaagacgatcttatcgttgacggtaaagatgcgctttatacccatccggaacaggcccgggaatttgtagaaaaaacgggtatcgactcgttagccattgctatcggcaccgctcacggcctctacaccgctgaaccaaaacttgattttgaacgactgacggaaattcgtcagcgggttgatgtccccttagtccttcacggcgcctctggcctgccgacccgcgatattacccgcgctatttcgctgggcatctgcaaagttaacgtcgcgaccgagcttaaaatcgccttttccggagcgcttaaaaactatttaacgcaacacgcagaggccagcgatccccgccattacatgatcccggcgaaagcggccatgaaagaggttgtacgtaaagtgattgccgactgcggttgtgaagggaagctctaaagcccccggatttagcacggcaaagggcgttttcatagctggatcacgaaagccattattatcctttgccttcaaaccaaaaatattatgaagataaacaaaagatatcggagccagaagtgaaagaaataatttctcgtcacaaagcaggggaacagatagggatctgttccgtatgttcagcacacccgctggtgattgaatccgcattacgttttgacctgaatagcgggaacaaagttctgatcgaggcgacctctaaccaggttaatcagtttggcggttataccggcatgaaaccggctgactttcgtgattttgtctatggcatcgcccaggaagtgggttttccacgcgaacggcttattttaggcggcgatcacctgggacctaactgctggcaaaacgaacctgcggatacggcgatggaaaaatccgtcgaactcattaaggcttacgtcgctgccgggtttagcaaaatccatcttgatgcctctatgtcctgcgctgacgacccgacgccgctggacccaatggttgtcgctaaacgcgccgccttgctttgccaggcagcggaaacgacggcgaccgacgaacaaaaacgccatttaacctatgttatcggcactgaagttccggttccgggcggggaagccagcgccattaacgccgtgcatgttacccgcgaacaggatgcggcccgcacgctgcaaacgcatcaggctgcttttcgcgccctggggctggatgaggcattgaaccgggttatcgcgattgtcgtacagccgggcgttgaatttgatcatacccagattattcattatcagccgcaggcggcacaggcgctctccgcatggataaaagaaacgccgatggtctatgaagcgcattcgactgattatcagacgcgacaggcctaccgtgcgctggtacgcgatcattacgccattctgaaggtcggcccggcgctcactttcgcgctgcgcgaagccattttcgcacttgcgcaaatggaaaacgagctgatctccccggaacaacgtagtcgggtactggaggtcattgatgaagttatgctaaacgaaccgggctactggaaaaaatactaccgtccaacctggagccaggcgatggtcgacatccactttagtttgtctgaccgtattcgctattactggccgcacccgcgtattcgtcaaagcgtagagaagttaatcgccaatctgaacaacgtcacattgccgctgggattaattagccagtttatgcccgtacagtttgaacgcctgtctgagggcgtgctcacccctacgccgcataacctgattattgacaaaattcaggatgttctgcgcgcttatcgcttcggttgcacgccggatgtcgcctgaataatggagaatttatgagccaactatttgtccgaaccggaatcacattcgactcgagccaacaggcgctggtgcacattggcaaagagatgctggcgaaaggcgtggtacatgatagttatccgcaggcgctggtggaacgtgaagcgtcttttcctaccggcattgcgctggagcgtcacgccgtcgctatccctcattgcgaggcggttcatgcgaaatcacccgctatctatctgattcgtccagataagccggtcatgtttcaacaggcggatgatgacgaagagattgccgtttcgttaatcatcgccttaatcgttgaaaacccggcggcacagctaaaacttctgcgccgcctgtttagtgagctacagaacccgagcaccctcgatgccctgttaagcgcgccggatgccgaactggcgatacgctttcaggaaaccatccttgagcctgagcagtgcgtccaggtttgataataaattgataataatgaggaataccctatgaaacgtaaagtaattgtggcctgtggcggtgcggttgcaacctcaacgatggctgcggaagaaattaaagagctatgtgatgccaaccatattgagctcgacttagtgcaatgccgggtcaccgaaatcgaaacctatatggacggcgccgatcttatctgtaccactgccagggtcgatcgcgcctttggcgatattcccgtcgttcacggtatgccttttgtttccggcgtgggtattgaagcattacagcaaaaaattctgtccattctcatggggtaacgtatgtttagcgaaataatgcgttatatcctcgacttaggcccaacggtgatgttgcctctggtgatcatcgtgttctctaaactgctgggaatgaagcttggggattgttttaaatcgggtttgcatattggtatcggcttcgtgggtattggtctggtcatcggcctgatgctggattctatcggccccgcggcgaaagccatggcggaacatttccaaatcaatctccacgttattgacgtcggctggccaggttcatcgcccatgacctgggcgtcacaaatcgcgctggtcgcgatccctgtcgccatcggggttaacgtcctgatgctggtgacccgcatgacccgcgtggtgaatgttgatatctggaatatctggcacatgaccttcacgggcgccatgctgcatctggcgaccggttcatactggctggggattctgggcgttgtggttcatgccgcctttgtctacaaactgggggactggtttgccaaagatacccgcgactattttggcctcgaggggattgctatcccacacggttcatccgcgtacctgggccccgtggcggtactcgttgataccattatcgagaaaattcctggtctcaatcgtattcactttagcgcagacgatgtccagaaacgcttcggaccgtttggcgagccggtgactgtcggcttcgtgatggggctggtgattggtgtactggcaggctacgacgccaaagccgttctgcaactggcggtcaaaaccgcagcggtgatgctgcttatgccacgcgtcattaaacctattatggatggcctaacgcctatcgcgaaacatgcgcgtaaacgtctacaggctaaatttggcgggcaggagttcctgataggccttgatccagcgctactgctcggtcatacctctgttgtctccgcgagcctgatattcattccgctgaccatcctgattgccgtcttagtaccggggaaccaggtgctgccgttcggcgacctcgccaccatcggtttctttattgcgatggcggtcgcggtacaccagggcaacctgttccgcacgctgatttcaggtgtcattattatgggtatcaccctgtggatagccacccagacgattggcctgcatacccaactggctgccaatgccggagcgctaaaagctggcggacaagtcgcctcgctggatcagggcggttctcccatcacctggctgctgattcaactttttacctggcagaatatcgtcggcttcgccgtcattgccattatctatctggccggcgtactgctgacctggcgtcgcgcccgacagtttgtcgcggctgagaaagccacggcgctacagcaaagtcaaatcgcctcttaattttaggggagcaatcgctcccctcaccttcctggagaatgttatgaaatcagtggttattcacgctgagggagacgtgcgcgttgaagaacgtcccttaccacaactgcaagccgaggacgatgtgttggtcaaagtcgttagctcagggctttgcgggtcggatatcccgcgtattttcgcgcagggcgcccattattatcctattacgttaggccatgaattcagcggctacgttgaatcctacggcacaggcgtaacggatatgcagcctggcgatgccgtcgcttgtgtcccgcttcttccctgctttcgctgtccgcaatgcgaacgcggttacttttctttatgcaaacagtatcagtttgtaggatcgcgcagcgaaggcggtaatgcggaatatgtggtggtcaaacgggccaatcttttccgcttgccgtctgatatgccgattgaagatggcgcgtttatcgaaccaattaccgtgggcttacacgcctttcatctggcgcagggctgcgaggggaaaaacgtaattatcgttggtgccgggacaattggcctgctggccttacagtgcgcgcgggaactgggcgcgcgaagcgtaacggcgattgatatcaatccgcagaaactggaacttgcgaaagcgctcggcgcaacgcatacctgtaatagccgggaaatgaccgccgacgacatccagaccgcgttgtccgacattcagtttgatcaactggttctcgaaacggcaggaactccccagaccgtctcgctggctatcgatatcgccgggccgcgcgcgcaactggcgctggtggggacgttacatcacgatctcaccctgacaacgcgtacattcgggctaattttgcgtaaagagctcacgctcctcggcagttggatgaactactccgcgccatggccaggagaagaatgggaaaccgcagcgcgcctgttggctgaaaaacgtcttcaactgacccctctcattgcccatcgcggcgatgcggaaagctttgcagaagcagtcaaagcgcttaatggcgcgcccatgcagggcaaaatcctacttcaactttcctgatggtacgagccagcaacctgcgctggctcacatttcctttcgaaatttagcgttcacctttcgcaatccttcgtttaaactagttacagttaattatcaggcaaatcaatatgaactcatttgagcgaagaaataaaattgtcgacctgattaatacgcaaggcagcgtgctggtgatggacctttcaaatacatttggtatttctgaagtgactatccgtgctgacctgcgtctgctggaagagaaaggccttgtcacccgttttcatggcggcgcggcaaaaccgggaagtcatctggcggaaggcgacaatcaggaagtcattctggaagatcggtatcaactcgccagcgatccgaaaaagcggattgcccaggcggctgcggcaatggttgaagaaggaatgaccatcattctggatagcgggagcacaacattactgattgcggaagcgctcgcgcgaaaaagcaatattacggtgatcactaacagcttgcctgccgcttttacgctatcagaaaataaagatctcacgctggtggtctgcggcggtacggtacggcataaaacccactcaatgcacggcacgattgcggaacgatcgctacacggcatcagcgccgatttaatgtttgtcggggcggatggcattgatgcgacaaacggtattaccacgtttaacgaaggttattccattagcggcgtcatggcggcggcggcacacaaagttatcgcggtactggacgcgaccaaatttaaccgtcgcggctttaaccaggtattgccgatggacaagatcgactgtgtgataaccgatgacaccatcagcaaacaggataaagcggcattagcgaaaacaggcgtggaattaatgatcgtctaaaaaggagtcggttatgcgttgctgatcgcgagagtaagcccgaaggaaaggtccggcccgctatcaccgcccaatgcccccatcaatttacccacatcaatcacctgattgagtattaacgcgatggcgataaaaggcggttcccgggcgctcgcttttattcttcctgctgctccagcgcatacttatacagcgcatttttcttcacgccgtgaatttctgctgccagcgccgccgcttttttcagcggcagttctgcctgtagcagcgccagcgtgcgcagcgcgtcggcgggcaggtcgtcttcttgcgctttatggccttcgacaatcagcaccatttcgcctttgcgacggttttcatcttctttgacccacgccagcagctcgccaacgggcgcgccgtgaatggtttcccaggttttggtcagctcacgcgccagcaccacataacgggattctcccaataccgcgacgatatcttccaggctatctaacaggcggtgggttgactcataaaaaatcagcgttcgcggttccgtttcaatggcttttagcgcatcacggcggccttttgatttggcaggcaggaagccttcataacaaaaacgatctgatggtaaacccgcggcgcttaatgcagtgatagcagcacacggccctggtagcggcaccacgcgaatccccgcttcacggcaagtacgcaccagatggtagcccggatcgttaatcagcggcgtaccggcgtcggaaaccagcgcaatgttctgcccttcttttagcttcgcgaccagcgtttccgctttttgttgttcgttatggtcgtgcagcgcgaacaatcgggcattaatcccaaaatgttgcagcaataaaccggtgtgacgagtatcctcggcggcaatcagatctacagcctgtaacacctccaacgcacgctgggtaatatccgccagattaccgataggagtaggtacaataaagagttggccctgagaattatccgccgattcgttttgtttcattgtgtcgtccgtattgccgatttaatattgagcattgcgtaaaaaaatatcactggatacagtatggtaccctcaacattttctcgtttgaacgccgcgcgcgcgctgcctgtcgtcctggctgcgctacttttcgccgggtgcggcacccaggcgccagatcaaagcgcagcctatatgcagggttcagcgcaagctgactccgccttttacctgcatcagatgcagcaaagcgcagatgatagcaagaccaactggcaattactcgccattcatgcactgctgaaagaaggaaaaagccagcaggccgtcgacctgttcaaccaactcccgcaaaatctgaacgatgcccagcgtcgcgaacagtctttattagcggtagaaatcaaactggcgcaaaaagatgtcgcaggcgcgcaggccttgctggataaactaaaacctgccgactttgcgccaaatcagcaagcgcgttactggcaggcgcagatcgttgccagccagggacgcccgtcgcttaccctgttgcgggcgttaatcgcccaggaaccgctactggcggcgaaagataaacaaaaaaatatcgacgccacctggcaggcgctctccgccatgacgccggatcaggccaagacgttagttatcaacgccgatgaaaacgtgcttcagggctggctggatctgcaacgcgtctggtttgacaaccgcaacgatccggacatgctgaaagccgggatcgccgactggcaaaaacgctacccgcaaaatccgggggcgaaaatgctgccgacgcagctcgtcaatgtgcaacgtttcaaaccggcttccaccagcaaaatcgctctgctgctgccgctgaacggtcaggctgccgtgtttggccgtaccatccagcaaggtttcgaagccgcgaaaaacctcggcacccaggcggtggagatgcagcctgccgccgctcctgacgcgccggtcgaacctggcgtggaggagacgcaaccacaaatgaccaacggcgtcgccagtccgtcgcaggcctcggtgagcgatctgactgatgacgctccagcccagtccgctacgccagtcagcgcgccacaaactccccctgctacagcaagcgcgccggcggatccctccgctgaattaaaaatctacgatacctcttcccagccgttggatcaggtgctcgctcaggttcagcaagacggcgccagtatcgtggtcgggccgctgttgaaaaacaatgtggaagcgctgatgaaaagcaacacgccgctcaacgtgctggcgctcaaccagccggaaacggtacgtagcttccctaatatctgctatttcgcgctctctccagaagatgaagcccgtgacgcggcgcatcatatttatgaccagggcaagcagtcgccgctgctgttgattccacgcagcgcgcttggcgatcgcgtggcgaacgccttcacccaggagtggcaaaaactgggcggcggcatcgtgttacagcaaaaattcggctccgtagccgagctgaaaatgggcgtgaacggcggcgcgggtatcgcgttgacgggcagtccggtcgccgccagcgtgcctgcgcagcctggcgtcaccattggcggtctgaccatccctgcgccgccgaccgacgcgcaaatcaccggcggcggacgcgtagacgcggtctatattctggctacgccggaagagattggctttatcaaaccgatgatcgccatgcgtaacggcacccagagcggcgcgacgctgtatgccagctctcgcagcgcgcaaggcacctccggccccgacttccgtctggaaatggagggtttacaatacagtgaaattcctatgctggcaggcggcaatatgccgttgatgcagcaggcgctgagcgctgtacataacgactattctctggcgcggatgtacgccatgggcgtggatgcctggacgctggcgaaccacttttcgcagatgcgtcaggtgcagggatttgagatcaatggtaataccggcgcattaaccgccagcccggattgtgtgattaacaggaagttatcatggctcaaataccagcaaggggagattgttcccgccagctaacgcgtaaacaggctggcgacgcgtgggaagctgccgcgcgtcgctggctggaaagcaaaggactgcggtttatcgccgccaacgtgcgcgagcgcggcggcgaaatcgatctgatcatgcgcgacggaaaaacgacggtttttgttgaggtccgctatcggcgctccgggctttatggcggcgcggcggctagtgtgacccgcagcaagcaacacaaattattacatactgcccgcttgtggctcgcccgccagaatgggagttttgatactgtggattgtcggttcgatgtgttagccttcaccggaaatgagattgagtggtttcgggatgcgtttaacgaccactcataattgaagattttaaggattagcgtgctcgaaagaatcaaagtttgctttacagaaagcattcaaactcaaattgctgcggcggaagcgcttccggatgccatttcccgcgccgccatgacgctggttcattccctgcttaacggcaacaaaatcctctgttgtggaaacgggacgtccgcggccaacgcacagcattttgctgccagcatgattaaccgctttgaaacggagcgacccagtttacccgccattgcactaaataccgataatgtggtcttaactgcgatcgctaacgatcgcctgcacgatgaagtttatgcaaaacaagtccgggcgctgggacatgcaggcgatgttttattggcgatctctacgcgtggtaatagtcgcgatatcgtaaaagccgttgaagcagccgtcacacgtgacatgaccattgtggcgctaaccgggtatgacgggggtgagctggccggactattagggccgcaggatgtcgaaattcgtatcccttcacaccacagcgcgcgcattcaggaaatgcatatgctgacggtaaactgcctgtgcgatttgatcgataacacgctttttcctcaccaggatgattaaggagtacacatgaaggcattttcgccgctcgcagtccttatttctgcgttgctattgcaaggttgcgtcgccgccgcggtagtgggtacggcagccgtcggcaccaaagccgcaaccgacccgcgtagcgtgggcacccaggtggatgacggaacgctggaactgcgtgtcagcagcgcgctgtcgaaagatgagcaaatcaaaaaagagacgcgcatcaatgtcacggcttatcagggcaaagttttgttagtgggccagtcgccaaacagcgaactctccgcacgcgctaaacagatagcgatgggcgttgaaggcaccaccgaggtctataacgagattcgccagggtcagcctatcggcctggggaccgcctctaacgatacctggatcaccacgaaagttcgctcacagctactgaccagcgatcaggtaaaatcgtcaaacgtgaaagtcaccaccgaaaatggcgaagtgttcctgctgggcctggtgactgaacgtgaaggtaaagcggcagcggacatcgccagccgggtgagcggcgtgaaacgcgtgaccaccgcctttacgtatattaagtaaccggtgtgccgggtggcgataagaatgtgtaaaccgcgtcgccatccggtaaatcatccggcttcgctattccgctttttcccgcagttgcgatgaggtcagaatcgtcacgccttcttgtgctggcgccagcgcttccgccagcatggcccgcgccacatcccgcgcatcaatcgatttccagtttcctggcaacagccggaatagcggagcgaaaagcgtttcattcacccgccgcgttgttctgtcgccgagcagcatagaaggccgggcaatcgtcaaacgaggccaattttgcgcgattaacgcctcctccatttctcctttcacccgattgtagaaaaacggagagtgcgcgtttgctcccattgcgctgaccaccaacatgtgctgcgcgcccagtcgacgcccggtcagcgcggtatcaaccaccagcgtataatccgcatgaataaacgccgctttacttcccgcttcacgccgggtcgtgcccaggcagcaaaaaacaatatccaccgggtcggtcacctgagctaacgcgtcggtaagctgcggatcgtgagggttataaacgccgacaatatccgtcagcgggcgacgcgtcggcgcggcgatagcgctcacctgcggcgtgttgattaacattctcagcagatgtccgccgaccagtccggtcgcgccggtaatcagtacctgactcatcctcgctcctttacagatttgtccaccttgcactctcggccctatcgaccaggcttaatagtctacgaggtaagtatccatcattgtggaaaatttgccttacccgacgccaccactgcggaggaaacgcatgagtaagaaaattgccgttttgattaccgatgaatttgaagattcagaatttacctcgccggcagcagaattccgtcaggccggccatgaggtcatcaccatcgaaaaagaggcgggtaaaacggtgaaaggaaaaaaaggcgaggccagcgtcaccattgataaggctattgatgacgttcgtcccgacgagttcgacgccttgctattgccgggaggtcattcgccggactacctgcgcggcgacagccgtttcgtggattttacccgcgatttcgttaacagcggtaaaccggtttttgccatttgccacggcccacagttgttgatcagcgccgatgtcattcgtggccgcaaactcacggcggtgaaaccgattattatcgatgtgaagaatgcgggcgcggaattttacgatcaggaagtcgtcgtcgataaagatcagctggtgaccagccgcacgcctgacgacctgccggcatttaaccgcgaggcgctacgcctgctgggcgcgtgagtcgcgtaaccagtgcagttttttaccaaaccccagcgtgttgtcggtgaatttaatttcatccagccggatttcccataccggcgctggcagcaccctggcgaccgggaagcgacgaaggtaagctttacgcgcggcgtcgctctcctgcccctccagacggcgaatttcccctttaaactgtacgccgcgaatgcgcgccaccgttttcggctgaccattgaccgttcccgcaactggcgcgcacgcgccagacatttgcgcatggcgggttttatcatccgttaacagatacagcgcgacgttttgcgcatcaaacaaataaaacgcattggcgcaccacagctctccctcatggtgtacgcaccaggtcaccacgtgttgtttcgccagccaacggccaatagcggtaagtgtgtccatctttattctcgcttatactgggaacctgaaaattatcatgctgatggcgacaatgacaccctggtatctgtatctgattcgtactgcagacaatgcgctttacaccggaataaccaccgatgtggcgcgtcgttacaggcagcatcaaacgggaaaaggcgcaaaagcattacggggaaaaggcgagttaacgctggcgtttgcggcgcaggtcggcaatcgctcgctggccctgcgcatagagtatcgcatcaaacagctcacaaagcgccagaaggagcgccttgtgacggaacgcgaagcgtttgaggcgctgctgtccagcctgcaaacgccggtgcttaaaaacgattgaagtggtcgtgatactccaccagccccgtcacgccctccagcgcatcctcagccaaacggtgtacctggaaagcgctttccgtaccgggccaacggcagtgaagatcgtaatgtgcggccagttcaaaaccgaagcggctatataacgccggatcgcccagcgtcacgaccgccgcgtagccgaactcgttgagcgaatccagcccttcatacactaactggcgcgccagcccttgcccgcgatacttttcatcgaccgccagcggcgccatgccgacccactgtaaatcttcgccctgcacatcaaccgggctaaaggcgacatagcccaccacctgaccttcatcatccgtggccaccagtccgagcgtcagaaaaccatcttcacgcaaatcgtgaaccagcttcgcttccgcatcgctttcgaatgaacggcgtaacagcgcatcaataccaggcgcatcaatgggaatttctactcgaattagcatggttcacctaccgaggtctgtttggtttccggcgagtttttcattcccgcctcaacaaaatccgccagttgcagcagcataacgcgtaacgctttcggcatctgctccagttcgatggcgtccatcagattcttcacatacaaccctaactcagtatcgccttcaatgaccagtcgacgctggaaaaagagcgtatccggatcctgtttacgggcggcgatcattagcagatcgctggcgtcggcgctaaaactgacgtcagcatccgcctgctggctaacgatcagcttttcattttcaaccgtggtataccattttaagtcgatgtcacgaacatgaatgcttaaccaacgaccttcgaggaattccagctctccatcggccagcgcctgacgaaactgccagctcagaacctgttccagaacctggcgctttagcgcaaagggcgtcagtttaaccggtacactcatcagagacgggccagcatggactaagcgtgaacgcagtttatctaacacgagctttactccctgtttcaatagtcctgttattttgccatatccaataaatcacatggcggcgtaaatcaacaattgggtctgattttctaccccattattggtgttaccaatacgcctttaactgccttaaatcaaaaattgtcgcagcaaggttaactaaaatccctgttcgttaacaattttgcgtctcagacgtaaccctcaggataaattatggagctgctctgccctgccggaaatctcccggcgctgaaggcggccatcgaaaacggcgctgacgccgtttatatcgggttaaaagacgataccaatgcccgtcattttgccggccttaactttaccgaaaaaaaattgcaggaagcggtgagttttgttcaccagcatcgccgcaaattacacatcgccattaatacttttgcgcatccggacggctatgcccgctggcagcgcgccgtggatatggcggcgcagcttggcgccgacgcgttgattctcgccgacctcgctatgctggaatatgccgcagagcgttacccgcatattgagcgccatgtttccgttcaggcctcggcaaccaacgaagaggcgattcgcttttatcaccgcaactttgatgtccaccgtgtagtactgccgcgtgtactgtcgattcaccaggtaaaacaactggcccgcgtcacgccggtgccgctggaggtattcgcgtttggcagcctgtgcattatggcggaaggtcgctgctatctttcttcctacctgacgggggagtcgcccaataccgtcggcgcctgctctcccgcccgctttgtccgttggcagcaaacgccgcaggggctggaatcgcgcctgaatgatgtcctgattgaccgttaccaggatggcgaaaacgcaggctacccaacgctgtgtaaaggccgctatttagtggacggcgagcgctatcacgcgctggaggagccaaccagcctgaacacgctggaactgctgccggagctcatggcggcgaacatcgcttcggtgaagatcgaaggccgccagcgcagcccggcctacgtcagccaggtggcgaaagtgtggcgccaggcgatcgatcgctgcaaagccgccccgcaaaacttcgttccacagcgcgactggatggagacgctcggcgcgatgtccgaaggcacccaaaccacgcttggcgcatatcaccgtaaatggcagtgagaggagctatgaaatattccttaggaccggtgctttattactggccgaaagagacgctggaagatttttatcagcaggccgcaaaaagcagcgctgatgtcatttatctgggcgaagcggtgtgcagcaagcgtcgcgcgaccaaagtcggcgactggctggaaatggcgaaatccctcgccgccagcggtaagcaggtggtgctctccaccctggcgctggtacaggcgtcatctgaattaagcgagctgaaacgctatgtggacaacggcgattttctgctggaagccagcgatcttggcgtggtgaatctgtgcgccgagcgcaaactgccgtttgtcgccggccatgcgctgaactgctacaacgcggtcacgctgcgccggttgctgaaagaaggcatggtacgctggtgtatgccggtggagctgtcccgcgactggctggtgaatttgcttaatcagtgcgatgaactgggcatccgcaatcagtttgaagtggaagtgttgagctacgggcatctgccgctggcctactccgctcgctgctttaccgcccgttcggaagaccgcccgaaagatgagtgcgaaacctgctgtatcaagtatccaaacggtcgtgacgtgctctcgcaagagaatcagcaggtgtttgtgcttaacggtattcagaccatgagcggctatgtctataaccttggcaacgaactgacgtcgatgcagggattggtcgatatcgtgcggctgtcgccgttgggtacggagacatttgccatgcttgatgcctttcgcgctaacgaaaacggcggcgcgccattagcgcttgccgcgcatagcgactgcaacggctactggaggcggctggccgggctggagctacaggcctagccggatggcggcataaagaccttatctggcctacaaatagcgatcccgtaggcccgataagtgcagcgccatcgggcattgtttttgccgtcagtctcataaagctcactttgttaacaacattcgctaatctttaatgcagtattaaaagattaaccggtaacaaagtgagccgttatgactgacaaaactattccgttctcggtgctggatctggcgccgatccctgaaggatcttcggcaaaagaagccttcacgcactcgcttgatctcgcacggctggctgaaaagcgcggttatcaccgctactggctggcggaacatcacaacatgaccggtatcgccagcgcggcgacctcggtattgattggttatctggcggccaataccacaacattacatcttggctccggcggcgtgatgctgcctaaccattcaccgctggtgattgccgagcagttcggcacgctgaatacgctctacccgggacgtatcgacttagggttgggacgcgcgccgggtagcgatcagccgacgatgcgcgcgctgcgtcgccatatgagcggcgatatcgataactttccacgcgatgtcgcagagctggtggactggttcgacgctcgcgcccctaatccgcatgtgcgcccggtgcccggctacggcgagcagatcccggtctggctgttgggctccagcctgtatagcgcacagttggcggcccagcttggcctgccgttcgcctttgcttcgcatttcgcgccggatatgttgttccaggcgctgcatctgtaccgtacccagttcaaaccttcagcgcggctggaaaaaccgtacgcgatggtgtgtatcaatattatcgccgccgacagcaaccgcgacgccgaattcctgtttacctccatgcagcaggctttcgtgaagctacgccgtggggaaaccggccaactgccgccgccgattgagaatatggagaccttctggtcgccatccgagcagtatggcgtgcagcaggcgctgagtatgtcgctggtcggtgataaagcgaaagtccgccacgggctggaatccatcctgcgggagacccaggcggatgaaattatggtaaacgggcagattttcgaccaccaggcacgcctgcattcgtttgatttagcgatggatgttaaggaagagttgttgggctgattttataacgccgattttcaacggtgatggttggcaatcggcgatttttttcgaagtaatcatagccgggcttcaacatacgccagaaattatattccggccatgcttgcgcctggcgcatattttcgtcattcatcgtaaatgggaagatatggacaggcacgcgcttctgcccgctgtttagcgcctgcgccaccagttgataaatctcttcaataccggcatcggtcatggcatagcaaccggccgaaacgcagttcccgtgaaccataatgaaatcaccggtgtagccatttgcccgatcgtaagcattcgggtagccaatattaaatgccagatgatagcggctgtttgggttaagcaaccctttgttggtggcataaaagccttccgggcttttaccgtctccctgtttatgttttggccctaagccaccagaccatgcgcatatagtccaggttttgtagagtttgtaaggcttgttattggcgcttgcccacagttccagcttatcttccgctttcagaatgcggataaataactggtcgccggggtgaatgatttttaaagacgatgcgacaggtttttccactggcaggtaaacgtcttcatcgtacggagtgagccagaaaaattttaaaataaaagcgataaacaggctcaataatacaatagcgagtagtcctttacgccccattttcgtattccgcttattctgaaccagttcaagtatatattttcctatgatatgaaatagaggaaaggtccagttctgtacttttataaaatagtaatcgttttatcatggccgaacagggatatgaataaatcgacttattaccagagaaaatcatcatgagtgaacctgcttccttttttcttcatgcacatattaccgagagtaacctcaagaaatttttccattcaccggcaacaaatattaaagactatgacgactggttgccatggtttactgaggagcaaaggttgtacggcgatcctgcaaaaatgcttaacaatcttgccacatgtaattctggtgaaagtgaaaagaatatttatgctgaacatatcaactttaataaagaaacacagatagtcacgatggatcacatatttctctcagagagctatgaaatcttcatgccactcatggcctgtgtgcggggaatcgagaaatttattacgctaggggaaaataattttgcgctaatttattattactggtggggttcggagatcgccatcgcgctcgaatttggcgccaatggtagcagaataacggcaaatcctaaggcagaaaatttaactatcgccgatgcttttttcgatgaacacggggaagcactcgccgaagaactttataataaacagggttttatttgataccatttcgcggacttgtgaaatattgccagatgaaaacagctcatccggctcgttcaattactggtacaccggcagcaaattaaagctcgacagaatatggataaccgcgttgccaacaccgaagaccaaaatcagggcaatcatcggtttaccgccccagacgcgaaatttcgggctgccgaaacgttcgcgagatttacgtgccaacagcgcaggcacaatggccgcccagatagttgcagctaaacctgcatagccaatggcgtacagaaaaccgttcgggtacagcaggccaccaatcatcggcggcaggaaagtcagcagcgccgttttaaaacgccccattgccgagtcatcaaaaccaaacagatccgccagatagtcaaacagccccagcgtcacgccaaggaaggaactggcgaccgcaaagttagagaacaccaccagcagcagatccaggctgcggctgttcagcacgccgctcaacgcctgtaccagcacatcaatattgccgcctttctgcgcaatgccgataaattccggacgcgggatgttgcccatcgtccccagcagccagacggaatagagcgccagcgccagtaacgtcccataaatcaggcatttgacgatggtacgcggatctttgccgtaatatttcatcaagctcggtacgttaccgtgataaccaaaagaggccagacaaaatggcagcgtcatcagcaggtacggcgtatatgacgcgtggctttcagccacgttaaacaacgtggcaggctgaacgtgccccaacaggctgccgaaggtcaggaagaaagtaatcactttcgcgcccagcacaatcgccgtcatccgactgaccgccttcgtactcagccacactacaaacgccaccagcagcgcaaaggcaaaacctgccgctcgcgccggaacgttcaacgacatctcagcaaaggtatgatgcagaatcgagccgctcgccgagatataggcgtaagtcaggatgtagagcacaaaggcaatggaaataccgttgacaatgttccagcctttccccaacagatctttggtgatggtgtcgaaactcgaaccaatgcggtagttaaggttggcttcgaggatcatcagcccggagtgcagcatacaaaaccaggtaaagaccagcgccgccatcgaccagaagaaccacgccccggacatgaccaccggcagggagaacatccccgcgccaatgatggtgccgccgataatcaccacgccgccaagcagcgaaggtgacgtttgggtggtggtaagtgttgccattcagctctctctccagtcatttatagtgtgactatctctcaatacgctgcactgtaccagtacacgagtacaaaagaaataaaaaaagccccgattgtgacgatcggggctgtatattttactttacgctgtgaatgcgcaggtcagcgtgagttacgcatcaccgccgaaacgacggcgaccggtagagtcatcacgacgcggaccacggctttcacgacgctcgccgctgaagcgacgaccatcaccacgaccaccttcacgacgttcgccgctgaaattacgaccgccttcacgacgttcgccactgaagctacgaccaccgccgcgacgttcgccgcccgcgtgcggaaccgcatcacccaacagctgcatattcatcggcttgttcagaatgcgggtacgcgtgaagtgctgcaacacttcgcccggcatacctttcggcagctcgatggtggagtgagacgcgaacagcttaatgttaccaatgtaacggctgctgatgtcgccttcgttagcgatagcgcccacgatatgacgaacttcaacgccgtcatcacggcccacttcaatgcggtataactgcatatcgccaacgtcacgacgttcacgacgcggacgttcttcacggtcgccacgcgggccacggtcattacgctcgcgcggaccacggtcgtcacggtcacggaattcacgcttaggacgcatcggcgcatccggcggcagaatcagcggacgctcgccttgcgccattttcagcagtgcggcggccagcgtttcgagatccagctcttcgccttcagcagacggctggattttcgccagcagcgcacggtactgatccagatcgctgctttccagttgctgttgaactttcgcggcgaatttttccagacggcgtttacccagcagttctgcgttcggcagttccacttccggaatggtcagcttcatggtgcgttcgatattgcgcagcagacgacgctcgcggttctcaacgaacagcagcgcgcgaccggcgcgacccgcacggccggtacgaccgatacggtgaacgtaggactcggagtccatcggaatatcgtagttcaccaccaggctgatacgttcaacgtccagaccacgtgccgcaacgtcggtagcgatcaggatgtccagacgaccatctttcaggcgttccagagtctgctcacgcagcgcctggttcatatcgccattcaacgcggcgctgttgtagccgctacgttccagcgcttctgctacttccagggtcgcgtttttggtacgcacgaagataatcgccgcatcaaagtcttccgcttccaggaaacgcaccagcgcttcgtttttacgcatgccccagacagtccagtagctctggctgatgtcaggacgggtagtcacgctggactgaatgcgcacttcctgcggctctttcataaagcggcgggtaatgcgacgaatcgcttccggcatggtggcggagaacagagcggtctgatgaccttccgggatctgcgccataatagtttcaacgtcttcgatgaagcccatacgcagcatttcgtcggcttcatccagcaccagaccactcagtttagagaggtcgagagtgccacgttttaagtgatcaagcagacgtcccggcgtaccgacaacgatctgcggcccctgacgcagggcgcgtaactgcacgtcataacgctgaccgccgtacagggcaaccacgtttacgccgcgcatgtgtttagagaaatccgtcatggcttcggcaacctgtaccgccagttcgcgggttggcgccagcaccagaatctgaggtgccttcagctcaggatcaagattgttgagcagcggtaaagagaacgctgcggttttgccgctaccggtctgggccatgcccagcacgtcgcgaccgcccagcagatgcggaatgcactctgcctggattggagatggtttttcgtaacccagatcggtaagggcttcaaggataggagccttcagccccagatctgcaaaagtggtttcgaattcagccatgtagtacgtgtgcctcaaaattaatggcggccagtctacataactcatcatgaaattgatctgcaattttcattgaaaagtgtgaaccggctcaaagtaggtgtattaacgaacaacaacgccctcacccgcgaaggtgatggcaatcaaaaagattacgggctgatatgttcgtcagctattgctggtccgattctgccaggtcatcttggtcctggcccaggagcgataattccaacaatgcgtatcggtgctcaacaaagttatgaacgttgttggccaccgccagtttgaacagagccgtggcgctgtccaaatcccccagacttaggtaatacttacctaaatagaagttggtttcactgagatgctcagcgagcgaggtgttatccgttgcgtccgccttgagcctttccatcagcgttgcttcgctaatgtcgcccaggtagaactcgacaatgttccatccccattgctctttatccgatttttcaaagcgtgcttttaacgcttctttcgcctgcttctcattaagcttctgctcaacaagatacagccacaggctgcggtaaggatcattgggatcgtcttgataaaacgccagcagatcatcttgcgctaacttatcacggccgccgtaatacaatgcgataccgcggtttaagtgcgcgtagttgtaagttggatcaagctctagtacagaatcaaacgcttcataggcagcatcaaaattgcctgcctgcgttaaataaatgcctaagtaattgaatacttcaggcatatccggtctgattgccagcgcttgtgaaaaatcatttcgcgctaatgccctcaaaccaagactatcatacaacactccgcgctcatataaaagctgtgcgcgttcgtcatcggttaaagcccgactggcaagaatctgttccatacgcgccagaatcacttcctgctgtaaagtcggttgcaatggtactgcgaggacttcacttttacgccaggcggaattactgcatcctgcaagcgtaagtgctgtcgcaacgaaacaccagcgcaaaaaaggcttcatttcccactcccgaagacaacgattgaatgaacgtcctgttccccggtggctcaacaaggcgtccagccaggtctaaagccctccgcactgcggagggcaaaaggctaccttactcggcctgttcgctcgccggagcttccggcgcagccgcaggttgagactgctcggttgcttctttaatgctcagacgtacacggccctggcggtcaacttccagaaccttaaccgggacttcctgacccatctgcagataatcggtcactttctctacacgcttatccgcgatttgagagatgtgaaccagaccttctttaccgccgccgatggcaacaaacgcgccaaagtcaacgatacgggtcactttaccattgtagatacggccgacttcgatctctgcggtaatctcttcgatacgacggatagcgtatttcgctttttcaccgtcggtcgccgcgatcttcacagtaccgtcatcttcgatttcgatggtggtgccggtctcttcagtcagcgcgcggatcacagaaccgcctttaccgatcacgtctttgatcttgtccgtgctgatcttgatggtatggatacgcggcgcaaattcagagatatcgccgcgcggcgcgttgatcgcctgttccatcacgcccaggatgtgcagacgcgcacctttagcctggttcaacgcaacctgcatgatctctttggtgataccttcaattttgatatccatctgcagcgcagagataccgtcgcgggaacccgccactttgaagtccatatcgcccaggtgatcttcgtcgcccagaatgtcagacagtacaacgtagttgtcgccttctttcaccagacccatagcgatacctgctacggcggctttaattggcacgccagcgtccatcagcgccagagaagcgccgcacacggaagccatagaggaagaaccgttggattcggtgatttcagacaccacgcgaacggtgtacgggaatttatccatgtccggcatcactgccagcacgccgcgcttcgccagacgaccgtgaccaatttcacgacgcttcggagaaccgaccatgccggtttcgcctacggagtacggagggaagttgtagtggaacaggaagctgtcagtgcgctcgcccatcagttcatcaagcacctgcgcgtcacgggcagtacccagagtcgcggtaaccagcgcctgcgtttcaccacgggtaaacagagcggaaccgtgagtacgcggcagtacgccagtgcgcacgtccagaccacggatcatgtctttttcacggccatcaatacgcggctcgcctgccagtacgcggctacgcaccacgtttttctcgatggcgtgcaggatttcgcccagctcgttagcatccagagtttcatcttctgcaataagctgctcgatggtttcggatttgattacgtcaacctgagcatagcgttcttgtttatcggtgatgcggtacgcgtcgctcagacgagattcagcaagcgcagcaacacgcgcgttcaacgcgtcgttgacggcttccggctgccagtcccaacgcggtttaccggcttctttcaccagatcgttgatcgcctggataacaacctgctgctgctcgtgaccgaataccaccgcgcccagcatagtgtcttcgctcagcagttcagcttcggattccaccatcagcacagccgcttcggtaccggcaaccaccaggtccagcttgctttctttcagctcgtcctgggtcgggttcagcacgtactggtcattgatgtaacctacgcgcgccgcgccgattgggccgttgaacggaatgccggacagcgacagcgcagcggatgcgccgatcatggcaacgatgtctgggttaacctgcgggttaacggaaacgacggtcgcaataacctgcacttcgttaacgaagccttccgggaacagcggacgaaccgggcggtcaatcagacgcgcaatcagggtttcgccttcgcttggacggccttcacgacggaagaagctgcccgggatacgaccagcagcgtaggtacgctcctgatagttaacggtcagtgggaagaagtcctggcctggcttggcttttttctggccgacaacggtaacgaatacggcggtgtcatccatgcttaccataacagcggcagtggcctgacgcgccatcatgccagtttccagcgtaacggtatgctgaccgtactggaatttacgaacgatcggattaagcaaaataatatcctttccaatttttgacggcataatacgcgccgtcgttaatacccgatcttctgcgcatcctcgcgactaatgacaaccctaaccctgatatgggtaaagcctctcattagccgcgcgaacctctgcaacggaagatcattcatagcaacaatacattagtttccagcgaattgctgccatctgctggaaaaaaggggccatgaaggccccctctttctgaaactcgaaagaattagcgacgcagacccagacgctcaatcagcgcggtgtagcgtgcaacatctttacgtttcaggtagtcgagcagtttacgacgctgagaaaccatacgcagcagaccacgacggctgtggtgatcttttttatgctctgcaaagtgaccctgcaggtggttaatctgtgcagtcaacagagcaacctgaacatcggtagaaccggtgtcgtttgcgtcacgaccgaactcagaaacgattttagctgtagcttcagtacttagagacattttaaaactccaaagtatttaagaatgagaggacgccgatctctaattcagcgatcccagtgtacgccgcgtaaactgttaaataatttacgcgacgttaagcggcggtattctactcgcagcgctcttttatcgcaagacgaagcgacattacgctgggtactctactaccagccgacgaggcgcgacacggccttcgtcgtcaatttcgcccataccgataaatttatcgtcttcaccttccgtcacacgaaccagtcccttcaacggcgcgcccgtggtacgaaccgggttgccatttttgaagtataccgaagatgttaacggcagattaacaacagggtagtccgaagctggactgtccattggcatcaataatggatcgagcaactgcgccgccggaacgccctgctgctccgcctgtgctaccagcgtctgcaaatgctccagcgtcaccatacgatccaccggatacttgctgaccgtcagacgacgcaggtacgttacgtgcgcgccacagcccagtttttcacctaaatcatcaataatggtacgaatataggtgcctttggagcaatgaacttccagctccagctcgttaccttcatggcgaataaacagcagctcatagacggtaatcgggcgggcttcgcgcggcacttcgataccctggcgggcatattcgtacagcttcttgccctgatacttcagcgccgaatacatcgagggaatctgttcgatatccccacgaaaggtctccagcgcgctcgcaagctgctcagcgctgaaagtcaccggacgctcctgcacgatttgaccatcggcgtcagaggtatccgtgcgctgccccagacgggcaataacacgatagcgtttgtcagaatccagcaggtactgcgaaaattttgtcgcttcgccgaggcaaatcggcaacatgccggtcgccagcgggtccagcgcgccggtatgcccggcgcggttggcattgtagatgcgcttaactttctgcagcacgtcattgctggacataccctgcggcttatccagcagcagaacgccgtgaatgtcgcggccacgacgacgaggacgactcatcagtcctccttgctgtcgtccgggttcacacgacgttcttcgtcatgtttcaccacgttagttaccaggttggacatacgcatcccttccaccagcgagttgtcgtagaagaaggtcagttccggcacgatgcgcagacgcatcgctttacccagcaagctgcggatgaaaccagacgcttcctgcaacgctttgatgcccgcttttactgcgtcttcatctttgtcgttcaaaaaggtgacaaacactttggcataggccaggtcacgggacatttcgacaccggagacggtagtcatcatgcccaggcgcgggtctttaatttcgcgctgcaggatgattgcgatctctttttgcatctcttgcgctacgcgctgagggcgaccaaattctttcgccataataaattctccagaataaagacaaaaaaggggccataagcccctttttaaatttcttgccgggtggcgcttcgcttacccggcctacgcctaatcatcttctaaggattttggattgcaacaaggcggcaagctcgtaaatccccgggagcatagataactatgtgaccggggtgagcgagcgcagccaacgccgttgcggcccaaaagacgacgaagattaagcgatggtacgttggatctcgataatttcgaatacttcaatcatatcgccaacgcgaacgtcgttgtagttcttcacgccgataccacattccatgccgttacggacttcgttaacgtcatctttgaagcggcgcagggattccagctcgccttcatagataaccacgttgtcgcgcagtacgcggattgggttatggcgtttaatcgtaccttcggtaaccatacagcccgcgatcgcgccgaatttcggcgatttgaacacatcgcgcacttcagccagaccgataatctgctgtttcagttccggagacagcataccgctcatcgccgctttcacttcgtcgatcaggttatagatgacggagtagtaacgcagatccaggctttcagattcgatcactttacgcgcagaggcatcggcacgaacgttgaagccaaccagaatggcgttggacgccgcagccagggtcgcgtcggtttcggtgataccacctacgccagaaccgatgatcttcactttcacttcgtcggtagacagtttcagcaaagagtcggagatcgcttccacagaaccctgtacgtcggccttcagcacgatgttcacttcgtgaacttcgccttcggtcatgttggcgaacatgttctcaagtttagatttctgctgacgcgccagtttaacttcacggaatttaccctgacgatacagagcaacttcacgcgctttcttctcgtcgcgaacgacggtcacttcgtcacccgcagccggaacgccggacaggccgaggatttccaccggaatggacggccccgcttccagcacttcctgacccagttcgttacgcatcgcacgcacgcggccgtattcgaagccacacagcacgatatcgcccttatgcagcgtaccttcgcgtaccagaacggtagccaccggaccacgacctttatccaggaaggattcgatcaccgcaccgctcgccatacctttacgaacggctttcagttccagaacttcggcctgcagcaggatagcgtccagcagttcgtcgataccggtgcccgctttcgcagacacgtgaacgaactggctctcgccgccccactcttccggcagaatgccgtactgggacagttcgttcttaacgcgatccggatcggcttccggcttatcgattttgttcaccgcaaccacgaccggcacacctgccgctttcgcgtgctggatagcttcgatagtctgcggcatcacgccatcgtctgccgctaccaccagaaccacgatatccgttgcctgggcgccgcgagcacgcatagaagtaaacgcggcgtgacccggggtatccaggaaggtgatcatcccgttgtcagtttcaacgtggtaagcaccgatgtgctgggtaatgccgcccgcttcgccagaggctactttcgtggaacgaatgtagtccagcagagaggttttaccgtggtcaacgtggcccatgatggtcacaaccggtgcgcgcggttcagccgcagcgccggtatcacggtcgctcattaccgcttcttccagttcgttttcacgacgcaggataactttgtggcccatctcttcggcaaccagttgtgcggtttcctggtcgataacctggttgatggtggccatagcacccagcttcatcatcgctttgatgacctgagagcctttaaccgccatcttgttcgccagttcgccaacggtgatggtttcaccgatcaccacgtcacggttaacggcctgagcgggcttctggaagccttgctgtaaagaagaccctttacgcttgccgcctttaccgccgcgaaccgcagcacgcgcttcttcgcgatcggctttggattcggcatgtttgccttttttcgccggacgcgctgcttttgcattacggccacgaccacgaccgccttcaacttcacgatcgttttcgtcttcggcctggcgagcgtgctgagaagtggtgacatgatagtcactggtgtcttctactggctcaggcgttgcggtccatttgttttcttccgccatgcggcgagcttcttctgctacacgacgcgcttcttcttcgagtttgcgacgtgcttcttcttccgctttacgcttcagctctgcagcttcattctcacggcgggctttttcggcctgggcggttttggtcatatcgtcagtctgttgattgctcactttgtctttttccgcagcttcacgtttcgctttttcagcggcttcacgcttagcttgttctgcggcctcgcgttcagctttttgttgcgcctcgcgtttggcctgttcttctgcctcacgacgggcttgctcttccgcttcacgctgcgcctgctcttccgcggccaggcgttcagcctcttgcggatcgcgtttcacaaaggtgcgcttcttgcggacttcgatttgtaccgatttactttttccaccggtacctggaatgttcagggtgctgcgcgtcttacgctgcagcgtcagtttatcgggaccagaaaccgcttcgcggttcaggtgcgccagtaaagtctgtttttcttgtgcggacacagagtcgtcagcagatttccggatacctgcatcagcaaactgctgtaccaggcgatccacggaaacctgtctctctgcggccagcgcttttagggttacatctgtcatgctgttccttcctgctacagtttattacgcttcgtcgccgaaccagcaaatattacgggcagccataatcagctcaccggctttttcgtcggtcaacccttcgatatcagccagatcatcaatgccctggtcggcgagatcttccagcgtacaaacaccacgagccgccagtttgaaagccatatcgcgatctaatccttccagattcagcagatcgtcagccggtttgttatcaccgaggcttgcttcctggtcctgcgccagagtggccagtgcgtttttagcacgctcgcgcagtgcttcaacggtcggctcatcaaggccgtcaatttccagcagttctttcattggcacataggccagttcctcgagcgtggagaaaccttcttctaccagaacggtcgcgaactcttcatcaatatcaagatatttagtaaagatctcgatagcggcatgtgcttcagcctgatgtttagcctgcaagtcatcaacggtcattacgttgagttcccagccgctcaattgcgaagccaggcggacgttctgaccattacgtccgatcgcctgcgccagattaccggcttcaacggcgatatccatggtatgtttatcttcgtccaccacgatagacgcgacgtctgccggcgccatcgcattaatgacgaactgcgccgggttatcatcccacagcacgatatcgatacgctcaccgcccagttcggtagagaccgcctgaacgcgcgcgccgcgcatccccacgcaagcgccgaccggatcgatacgtttatcgttggttttcactgcgattttcgcacgagaacccggatcgcgagccgccgctttaatttcaatcacttcttcgccgatttccggcacttcgatgcggaacagttcgatcagcatttccggcttggaacgggtgacgaacagctgcgcgccacgcgcttctggacgtacagcgtacagaacaccgcggatgcggtcgcccggacggaagttttcacgcggcagcatatcttcacgcagaatcaccgcttcagcgttaccggccatcccttcggatttaatttccagagagatattgtcgcggttcactttcttcaccacgccagtgacaatttcgccttcctggtcgcggaactgatcgacaaccatcgcgcgttcagcttcacggaccttctgtacgataacctgtttcgcagtctgcgtggtgatacggtcaaaggtgacagattcaatctgatcttcaacatagtcgccgacattcaggctttcgtcttcaaaacgcgccgcttccagcgtaatttccttcgtcggcatggtcacttcttcaacgatcaaccaacggcggaaagtatcaaaatcaccgcttttacgatcgatttctacacgaacatcgatctcctgctcatattttttctttgttgctgtcgccagcgcactttccagcgcttcaaaaattttttcgcgtggcagcgctttttcgttggagacggcttcaacaacagccaaaatttctttgttcatcgcgggcttttcacctcatccagactgttaaaagtggggaaccaggttcgccttctggatattactcagcgcgaacacttcatctttgccttcgactgtgacggtaatcatttcaccgtccaccgctttgataatgccctgccacttgcgacggttctgtaccgccatgcgaagaaccagcgcgacttcttcaccctggaaacgcgcataatgatcggcagtgaacataggacggtcgagacccggtgacgagacttcaaggttgtaagccacggagataggatcttcaacgtccagcaccgcgcttacctggtggctcacatcagcacaatcatcaacattgatgccatcttcactatcaatatagatgcgcagtgtggatgtgcgaccgcgaataaattcgatgccgaccagctcgtagcctaaggcttcaactggtgctgtaatcatctctgttaatttttgctctaatgtggacaagcccacccccaagacataaaaaaagggcctaaagcccagttattctgtagtcagataacaaaaaaccccgataaatcggggctttagataactgaaccctataaccgcaacggcggtctggtgtaccttccgaaagaatttttttcaaatccagctacgaaggacataatcttcacagtatatttgaaaaagaactctaagggaaagtggttgcgggggccggatttgaaccgacgaccttcgggttatgagcccgacgagctaccaggctgctccaccccgcgcctgaaacgtggcaaattctactcgttttgggcaaaatttgcaaatactgctgggatttggtaccgaggacgggacgtaaaatctgcgcacagtatagtgaccaggcatgagttatgtcaaccctattcccaatatgcagatgaatgaatatcactcttcgttatactcatcccacctctccggcttatacacgcatttcacaacgttatttcagtaaaccttcactaaacgcttcctgtctctgctaaaagatgattaaatgaaaactcagttattttgcataaaaatgcactaaagcagaaaccgatctcattatcagtcaatcaagcagggttctattctatgacgacgattcttaagcatcttccagcaggtcaacgtattggtatcgctttttccggcggtctggacaccagcgccgcgctgctgtggatgcgacaaaaaggagctgtcccatatgcttatactgcgaatctgggacaaccggatgaggatgactatgacgccattcctcgtcgcgcaatggagtatggcgcagagaatgctcgcctgattgattgccgcaagcagttggttgcagaagggatcgcagcgattcagtgcggcgctttccataatacgactggcggactgacctatttcaataccacgcctctgggccgtgccgtaaccggcacgatgctggtcgccgcgatgaaagaagacggcgtgaatatctggggcgacggcagtacctataaaggcaacgatattgaacgtttctatcgttacggcctgctgacgaatgctgaattacagatttacaaaccgtggctggataccgactttatcgatgagctgggtggtcgccatgagatgtctgaatttatgattgcctgcggtttcgactataaaatgtccgttgaaaaagcctactccaccgactccaacatgctcggcgccacgcatgaagcgaaagatctggagtttcttaactccagcgtcaagatcgtcaacccgattatgggcgtgaagttctgggacgagagcgtgaagatcccggcagaagaggtgaccgtccgcttcgaacagggccaccctgttgccctgaacggtaaaaccttcagcgatgatgttgagatgatgctggaagcaaaccgcatcggcggccgtcacggcctgggcatgagcgaccaaattgaaaaccgcatcattgaagcaaaaagccgcggtatttatgaagcccccggaatggcgctgctgcacatcgcttacgagcgtctgttgaccggtattcacaacgaagacaccattgaacagtatcattctcatggtcgtcagctgggtaaactgctgtatcagggccgctggttcgactcgcaggcgctgatgctgcgtgacggcctgcaacgttgggtcgccagccagattaccggtgaagtgacgttggagctgcgtcgcggcaacgactactccatcctgaacaccgtgtccgacaacctgacctataaggctgagcgtctgaccatggagaaaggcgagtccgtattctcaccggacgatcgtatcggtcagttgaccatgcgtaatctggacattaccgatacccgcgagaaactgttcggctacgcgaaagcgggtctgttaaccgcctcttccgcgaccggtctgccgcaggttgagaatctggaaaacaaaggcaaataagcccgcgtcgttgatgcaacaggccgcgaaagcggccttttttattgccagcttaggctcacataatttttaagtaaaactaaattgaaatttactaaaataaaatcaataataaattcacttaattaacggttttatttactaaaaaggtagaaaaatgaacagtgaacactttgtacgcctagccttagatatccttaaatgcagccaaaaagaacttgctggaaagctaggggtttcctccactcaaattagcaagtggaaaaaaggtgaacatatgtctgatgatatggaaaagaaattcagaaaaatcaccaacataggcgagtattctccactgcttgttgagtgggcaggctccgtcagtaatgcagaaaaatgggatcgtctgatgcattttattgctgatagagtacatgacagagcagaaaccggctacgtcacaacacctctactcgacgaagaagggttcttatgtgaagaaacgattgatacattggaaaaaatggggttatccgctccaaaatcgttccctgttgaattagatatcaactatgagaatacagatgatgaagaaactgaagatctatgggactccatcagcaataaccctcacagttcaattattgaaaaaatctataactcgctgaatgatgtctatggcttttatgctgcttatgttgatgaattaatacaagatgaagggttggatatctattcaactgatgccatcaatattatgtattctttgatgtcgcttgcagcttgcaaaattgagattgattcagcaacagcaccgaattttcgacaattccgttatgaagttgagaaggattatgaaaactggttaagccaactcaaacttctggcattccgtgcaggaattccattacgagcagagctcctccagatggtttacgatagtgcagatgatctgagtgttgcagctgaggctgaaagcttagatttaaataaatcacgaatccacccagatatctacatgaatgaaatactgactggtatgcgaatcattcaccaagttctccctgtaattatggaaaaacttgaaattacagatttcgagttggatgaaagcgccttacacataggaagataactgaggcggccctaagttagtaaagggcctccgttttcaacagacgaaaaaaagacgcttttcagcgtctttttcctggaatattggtaccgaggacgggacttgaacccgtaagccctattgggcactaccacctcaaggtagcgtgtctaccaattccaccacctcggcacggatactgctattagcgcgggatatcgctggtcggctgggccggtgcagcaggttgagtctgctcggtcttcgccggcgcgctcagattttcccactcgcttcctttattggttttgttgctattgatattacccaacaccagactgatgatgaagaacagcgtcgccaataccgccgtcattcgggtcatgaagttaccagaaccacttgaaccaaatagcgtagcggaagcgcctgctccgaaggaggctcccatatcagcgcctttaccttgctgcagcatgatcagacctacaaggccaattgccacaataaggaaaacaactaaaagagcttcgtacataatcaacctgttccttgcggagttgccgcgtaccaatgcttctaccaataaagcgggatttttactgtttcccactgaagcgggtgtgaatactaaccaaagcgaatgaccttcgcaagggcaatttaagcgcattgtatcaactgcggaaaaaaacagcaaaagcgttgttttttgcgggccgtaaggcggcaaccgccgcctttttagtcacttaaacgcttaaacggcttttaccgcatccgcgatacgatgggcgaatgccgtaacctgcgcttcatcctcgccttccaccatcacgcgaatcaacggttcggtaccggatttacgtagcagtacccgcccacgattgccgagcgtggcttctacgtccgccgttaccgctttcaccgcttcattttccagcggatcgccgctaccggcggtgtaacgcacgttaaccagaatctgcgggaacattttcataccgctgcacagatcgtgcagactcatatgattacgcaccatcgccgccagaacttgtagccccgctacaataccgtcgccagtggtcgttttatccaacagaataacgtgaccagagttttccgcgccgatgcgccagcctttttcctgcaatttttccagcacgtagcggtcgcccactttcgcccgggcaaacggaatgccaagctgcttgagcgccagctccagccccatattgctcatcagcgtccccaccgcgccgccgcgcagttgcccctggcgcagcccttcgcgcgcgatgatatacataatctgatcgccatcgactttattgccttcatggtcaaccatgatgacccggtcgccgtcgccgtcaagcgcgatgccgaggtccgccttctccgccaacacgcgcgcctgcaacgcgcgcacgtcggtcgcgcccacttcttcgttaatgttgacgccgtttggctcacagccgatggcgataacggtcgcgcccagctcgcgcagcacattcggtgcgatatggtaggtagcgccgttggcgcaatccacaaccactttcaggccattgaggctcagttcgttcgggaaggtgcctttacagaactcaatatagcgtccggcggcatcgacgatgcggctcgctttccccagctcggcggagtctacgcaggtgatctctttttccatttcggcttcgatggcttcttccacatcgtcaggcagtttcgtaccgtcgatagagaagaatttaatgccgttatcatagaacgggttatgcgaagccgagataacgatacccgcctccgcgcggaaagtccgcgtcaaataggcgacggctggcgttggcataggtccggtaaacgaggccgacagccccgcagcggcaaggcccgcctccagcgcggactccagcatatagccggaaatacgcgtatctttaccgataatgattttacgcgagccatgacgcgccagcacttttccggcagcccaacccagtttaagcacgaaatcaggtgtaatgggggcattgcctacacgtccgcgaatcccatcggtaccgaaatatttacgattactcatagcgtttgtttccctttgcagacagagtggcttctaccacccgcatcgcctctacggtttctttgacgtcatggacgcgaatgatctgcgcgccctgcatcgcggcaattaccgcgcacgcaaggctgccgttcagacggtctgatggtcccacgttaagtaactgaccaaccatcgttttacgtgacatgcccaccagcagcggcaggttaaaatgatgaaactcacccagtcgcgccagtaaggtataattgtgagagagatttttaccgaaaccgaatccggggtcgagcaacaatttctcttttgcgatgccggccttctcacaacgtgctatttgctcaataaagtagcgattcacctcggcaaagacatcgtcatatttcggcgcctcctgcatggttttggggttgccctgcatgtgcataagactgaccggcaagccggtttccgctgccgcttccaacgcgccgggctcggagagcgaacggacatcattgataatatgcgcgcccgcccttgtcgcttcacggatcacctcgggtttagaggtatccacagaaatccacacttcaaaacgttgcgcgattgcttccagtaccggaataacgcgatccagctcttcttccacgctcacttccgccgcgcctggtcgcgttgattccccccccacatcaataattgtcgcaccggcattcaccattaaattcgcatgtttcaccgcctcaatcagcgtgttatgcgcgccgccgtcggagaacgaatccggcgttacgttcaggatacccataacatgcggatgagtgagatcgagcgtggcgccctgagcgaagagtttcatggtcaaaatccctgttttatttgtggtgagttaaaaaaagaaaaaccccggggcaagccccagggtttcggtgagcgctaaacataatgttgtacaacaaacgtttatttgtcgcccagctgctctgacatcgtgttgcccgggttcggcgtgcgtggttcatcaaccggacgcggcgcctgaggcgtaccattgctgtcagagttattggtgccgtttggatcttcccagcccgcaggcggacgcacttcacgacgcgccatcaggtcatcaatctgcggcgcatcgatggtttcatatttcatcagcgcatctttcatcgcgtgcagaatatccatattgtcagtcaggatctgacgagcgcgattgtagttacgttcaatcagcgctttcacttcctggtcgatgatacgcgcagtttcatcagacatatgtttcgcttttgcgacgctacggccgaggaatacttcgccctcttcttccgcatacagcaacggaccgagtttctccgagaagccccactgggtgaccatgttacgcgccaggttagtcgcgactttaatgtcgttcgacgcgccggtagaaacatgctcaacgccgtagataatctcttccgccagacggccaccgtacagcgtgctgatttggctttccagcttctgacggctggcgctgatcgcgtcgccttcaggcaggaagaaggtcacgcccagcgcacgaccgcgcgggataatcgtcactttgtgcaccggatcgtgttccggcaccaggcgaccgataatcgcgtggcccgcttcgtggtacgcggtcgactctttctgcgcttccgtcatcaccatggagcgacgttcggcgcccatcatgattttgtctttcgctttctcgaactcaaccatcgacacaacgcgcttgttaccacgagccgcaaacagcgccgcttcgttcaccaggttcgcgaggtcagcaccggagaagcccggcgtaccgcgcgcaatgatcgccgcatcaatatccgtcgctaacggtacgcgacgcatatgcaccttcagaatctgctcacgaccgcgaacatccggcaggcctaccaccacctgacggtcaaaacgacctggacgcagcagcgccgggtccagaacgtccggacggttggttgccgcgataacgatgataccttcgttaccttcgaagccgtccatctcaaccagcatctggttcaacgtctgctcacgttcatcgtgaccaccgcccagacctgcgccacgctggcggcctacggcgtcgatttcatcgatgaagataatgcacggcgccgctttcttggcctgttcgaacatgtcacgcactcgagacgcgccgacaccgacgaacatttccacaaagtcagaaccggaaatcgtaaagaatggcaccttcgcttcacccgcaatggcttttgccagcagggttttaccggtacccggcgggccgaccatcaggacgcctttcggaattttaccgcccagcttctggaaacggctcggttcacgcaggtattcaaccagttccgccacttcttctttcgcttcgtcacaacccgcgacgtcagcaaacgtggttttgatctgatcttccgtcagcatacgcgccttgctcttaccgaacgacatggcgcctttgccaccgccgccctgcatctgacgcatgaagaagatccagacgccgatcagcaacagcatcgggaaccaggaaatgaagatagaagccagcaggcttggctcttcaggtggttcgccaacaaccttgacgtttttagtcagcaggttatcaagcagcttcggatcattaatcggaatgtaagtcgtgtaacggttactatctttcttggtaacgttgatctcacgtccgttgatacgcgcttcgcgaacctggtcctgattgacctcttgcaggaaggtagagtaatccaccttacggccattagactcgctgggcccaaagctctggaatactgacatcagcacaacggcaatgaccagccagagtattaggtttttcgccatgtcactcaagggattaacctcttattacaactgtgttaaaaacagcgtcaggatactctatatccagtttctttcaaaccttacgtctgaaatctgccggttatcactttcgcccggtcgctacaatgtacacttcacgcgaacgcgcacgcgaagagtccggcttacgaactttaaccttcgtaaacagggagcgaatttcccttagatactcatcgaaaccttcgccctggaacaccttcactacaaaacttccgcctggcgccagcacatcgcggcacatctctaacgccagctccaccagatacatggcgcgggggatatccaccgccggtgttccgctcatgtttggtgccatatccgacatgacaacttgtactttactgtcacccacgcgttccagtaacgctttcatgacaagttcatcacgaaaatcgccctgaagaaagtccacaccaacgataggatccataggtaaaagatcacaagcgatgatgcggcctttgccgccaatctgcgtgaccacatactgtgaccagcctcctggcgcagcgccgagatcgactaccgtcattcccggcttaaaaagtttgtcactttgctgtatttcatcaagtttaaaccaggcacgggagcgtagcccctttttctgcgcctgttgaacatatttatcgctaaagtgttcctgaagccagcggcttgagctggcagaacgctttttacctgtcatttaactttcccgtcggggcagttcatcgtagccaatggcgtaaatttctacacgcctatttggcgatataagggagatggcggtagaatgacccgttttcaatcccaacgtaagcaaaaatatacgatgaatctgagtactaaacaaaaacagcacctaaaaggtctggcacatccgctcaagcctgttgttatgcttggcaataatggtttgaccgaaggggtactggccgagattgaacaagcgttagagcaccatgaacttatcaaggtgaaaatcgcctcggaagatcgcgaaacaaaaaccttgatcgtggacgctatcgtgcgcgaaaccggcgcctgtaacgtacaggtcatcggtaaaacgctggtgctgtatcgcccaactaaagagcgtaaaatctcgctgccgcgttaaggatatcctaaagtcgaacacaaaatctgtgtaaaacgaggggttttccacgagcaggagagcaaaatgccacgctctctccgttgataaaaggccgctatgcggcctttttcctttctttacaatacaccaacaatttgcgtattgagtactacttaaaggtattccactttaagcacttcgtattccacatcgccgccaggcgttttgatcaccacgacgtcatcctgctctttgccgatcaggccgcgagcgattggcgagtttaccgaaatgagattttgcttaaaatccgcctcatcatcgccaacaatgcggtaggtctgctcttcgtcggtgtccaggttcagcaccgtgacggtagcgccgaaaatcacgcggccattgttcggcattttagtgacatcaatcacctgcgcattcgacagttttgcttcgatatctttaatgcgcccttcgcagaaaccctgctgttcgcgtgcagcatgatactccgcgttttcttttaaatcgccatgttcgcgcgcttcggcgatagcggcgatgatttcaggacggcgcacagatttcagaaaatccagctcttcgcgcagtttttcggctccgcgtaaggtcatcggaatagcttgcatttgttatacctcttgaacattcctgtagggggcaatgaactctaccccggctgctaagccagccccggcatatgccataccagggtcagaagcaaaaaaacaccaacccgggcgcgcagtcccaggtcagctacaatttcctctttgataaccattttaccctggagttccctatgggtcatcgtttactttttagggcgttgcgccgtagtatgacggcttgtttccagggtgttagcgcgagattatgcgattttccagatttatcatcggattgaccaccagtatagcgttcagcgttcaggccgcgaatattgacgaatacatcaaacagcttccggccggcgccaacctcgcgctgatggtgcaaaagattggcgcgcccgcgccggctattgattatcatagtcagcagatggcgcttcccgccagtacccaaaaggtgattaccgcgctggcggcgctgattcaactcggcccggatttccgttttacgaccacgctggagactaaaggcaacgtcgataacggcatcctgaaaggtgacgtaattgcgcgctttggtggcgatccaacgctaaaacgtcaggatattcgcaatatggtcgcgacgctgaaaaagtccggcgtcacgcaaatcgacggcaatgtgcttatcgacacgtcgattttcgccagccacgataaagcgccaggctggccgtggaacgacctgacgcagtgtttcagcgcgcctcccgccgccgccattgttgaccgcaactgtttttctgtgtcgctttatagcgcgcaaaaaccaaacgatttagcctttattcgcgtggcttcttattatccggtaacgatgttcagccaggtacggactctaccgcgcggttcggcagacgcgcagtattgcgagctggatgttgtgcctggcgatttgaaccgttatacgcttaccggctgtttaccacagcgcgccgacccgctgccgctggcctttgctattcaggacggcgccagctacgcgggcgcgatcctcaagcaggaactgaaagaggccgggataacttaccgcggcacgctgctgcgccagacgcaggttaacgagcccggaacgatcgtcgccagtaaacagtcggcgccactgcacgatctgcttaagattatgctgaaaaagtcagacaacatgatcgccgatactgtttttcggatgattggtcatgtcaggtttaacgtgcctggcacctggcgggcgggatcggatgccgttcgccagatcctacgccaacaggcgggaattgatatcggcaataccattattgccgacggttccggtctttctcgccataatctgatcgctcccgccacgatgatgcaggtgctgcaatatatcgcccaacacgataacgagctgaactttatctctatgctgccgctggcgggctatgatggttcattacaataccgcgccgggctgcatcaggcgggcgtagacggtaaggtttcggcgaaaaccggatcactgcagggcgtgtataatctggcgggctttattaccaccgcaagcggacaacggatggcatttgtacagtatttgtccggctacgcggttccacctgccgatcagcgtaatcgccgaatcccgctggtacgcttcgagagtcggttgtataaggatatttatcagactaactgagtgcattattgccggatggcggcgctaacgcgtcttatccggcctacaacgaacataataaaatgggccgcaaatgcggcccgttggcttttgtaggccggataagctttagcgccatccggctacgagattaacgtttgtagatgaattcgacgccttcttcgtcgtcttcatcccagtcgtcatcccagtcatcgtctgcgtcttcttccacttcagccaactgctggcgatgataatcgtcccacatgaactcgactttttccggctgttttgcttcttcagcctgcgcgatcggattctcgatgataaaggtcatcacatcccagcagagatctttcacccctagctgactggcggcggaaatcagatagtatttcccttcccagcccaacgcttcggcgatcgctttcgctttctcttccgcttcggttttatccatcagatcgatcttgttgaacactaaccagcgcggtttagccgccagatcctggctgtatttttccagttcgccaataatgatacgggcgttttccaccggatcggaaccgtcgatcggatcgatatcaatgaggtgcagcagtacgcggcaacgttcgaggtgcttcaggaagcgaatccccaggcccgcgccttccgccgcgccttcgatcaaccccggaatgtcggccaccacaaaactcttttcgctgtccatacgtaccacgcccaggctcggcaccagcgtggtaaacggatagtccgcgactttcggttttgctgccgataccgcgcgaatgaacgttgatttaccggcgtttggcatccccagcatcccgacatccgccagcagcatcagttccagcagcaggtcgcgcttatcgcccggcgtaccattggttttctggcgcggcgtacggttaaccgaggatttaaaacgggtattgcctagcccatgccagccgcccttcgcgaccaacagacgctgaccgtgtttggtcatgtcgcccatcgtttcaccggttccctggtcgataacgcgcgtaccgaccggcactttgatggtcacgtctttaccgcgtttaccggtacagtcgcggctcgcgccattctgaccacgttcagcgcggaacgatttttcaaagcggtaatcgatcagcgtattcaggttttcatcggcttccatccagacgtcgccgccgtcgccgccatcaccgccgtccgggccgcctttcgggatatatttttcgcggcgaaagctcacacagccattaccgccatcgcctgcaacgaccagaatcgatgcttcatcaacaaacttcattttattctccgtaaatcattcgcctgagcggggttgcgaaaccaccgtttcatgcttgcgtaaaccgccccaaatacgatgaccaatggcggaatacatcgcgcccgcaaccacgacaaacgcaccgagataacctaaaaggtttaacatcggtctggcgaagaaatcgggccaggccatagataaaagatctgaaaacagcagggtaaatagcggtgtaagcgtgattatcgcgctcacctgcgccgcctgccaacgcgccatcgcttccgccagggcgccatatcctaccagcgtatttagcccgcagaaaatcaaacaggcgagctgccagtcgctcagttgcgctatcaccatcggttttgccagcggcaagagcgctatcgtacataaagtgtacagtaaaaacaggatctgctgcgaggccagacgtcgcaataatactttttgcgccacgccatagctcacccacaccatcgccgcgcctacgccaaaaataacgccccaggtgtagtcggtcagtcgggtaaaaatctcgatcagactggtgttaaaaaacatcaccagcccgctcaataacatcagcgcgccaatcacctgcgtaccgcgcatcttttctttcagaataaagacgctggcgaccatcatgccaaccggcgagagctggccgataacctgcgacgcggttgggcttaaatattgcagggaagaactgaacaaaatgaaattaccgaacagtccgcaggtcgctatcgccaataacaccaaccaacgcggcttacgaaaaatacgcagcggcggcagctttctttttactgccagtatcgccccgaggccaatgctggccattaagaagcggtagaagacaatggttgaaggctccatcacctccagcacttgcttcattgctattggcaacgctccccagcacatcgcggtagtgagcgctaaaagaatgccaatgcctgcctgctgcttcatgccgtgttccctgcaaagacccgttaacggcattcgcacagccacacgggtatattttagtcggccatcgaatgtaaaaagccccgcaacaggtgcggggctttcatccgttaccggaccacaaaaaacttactcagcaacgatgctgatgtatttacggtttttcgggcctttaacttcgaatttcactttaccgtctgctttagcaaacagagtgtggtcacgaccgcaaccaacgttggtgccagcgtggaatttagtaccacgttgacgaacgatgatgctgcctgccagaactgcttcaccgccaaagcgttttacgcccagacgtttagcttcagaatcgcgaccgttacgagtcgagccgccagcctttttatgtgccatttaatctgctcccctaatcttaagcgctgatgccggtaattttcacatcagtgaaccactgacgatggccctgctgcttacggtagtgtttacggcgacgaaacttaacgattttaactttctcgccacgaccgtgggcaacaacttcagctttgattacgccgccatcaacgaaaggaacgccgattttgacttcttcaccgtttgcgatcatcagaacttcagcgaactcgatagtttcgccagttgcgatgtccagcttttccaggcgaacggtctgaccttcgcttactcggtgttgtttaccaccactttggaaaaccgcgtacataaaaaactccgcttccgcgcacacctttcaatgattcagagcgcgctataaatattcacaatagggcgcgaatattacgcaaattgcacggctttgacaagtgctaccatcaatacatgaagaaaaaaaacacaacgcatacggtaacgtttatctgcggcgttttttcagtacaatcagggtatatttctaaccataaaccctacgttacctcattcagacatgggataatcggggcgataagcccggcttttgcgatgaatttagaaaaaatcaacgagttaaccgcgcaagatatggcgggtgtcaatgcgacaatccttgaacagcttaattccgacgttcaactgattaatcagctaggatattacattattagcggcggcggaaaacgcattcgtccgatgattgccgttcttgccgcacgcgcggtgggttatcagggtaacgcgcacgtgactatcgccgctctgatcgagtttatccacacggcgacgctgctacatgatgatgtggtggatgaatctgatatgcgtcgcggcaaagcgacggcaaatgccgctttcggtaatgccgccagcgtgttggtcggcgactttatctatacccgcgccttccagatgatgaccagcctcggctcgttaaaagtgctggaagtgatgtcggaagcggtcaacgtgattgcagaaggtgaagtgctgcaattgatgaacgtgaatgacccggacattaccgaagaaaattacatgcgggtgatttacagtaaaacggcccgtctgttcgaagccgccgcccagtgctccggtattcttgccggttgtacgcctgagcaagagaaagggttgcaggactatggccgctaccttggtacggctttccagctcattgacgatctgctggattacagtgccgacggcgagcatctcggtaaaaatgtgggtgatgacctcaatgagggcaaacctaccttaccgttgcttcacgccatgcgccacggtacgccagaacagtcagcgatgatccgtaccgctattgaacaaggcaatggccgtcatcttctggaaccggttctggaagcgatgaccacctgcggttcgctggaatggacgcgtcagcgagcggaagaagaagccgacaaagcgatatccgcgttgcagatattgccggataccccatggcgtgaggcgctaatcggtctcgcacacatcgcggtgcagcgcgatcgttaatgccgttctcttatcccgcgtactgcgcgggatatcccattaagttctaataaactccagataccctatcgcctgtttttcacatactcatccaggacttcccctggcatattctgaatattgccgccacttacatgaactttttagaacattccttcacgaagcgttatagtatcgaacgtcgtcgggttgttaaaaccgtaagtgattaacctaaggagtgatggatgtatggaaagcaagcttattgactggcatccggccgatatcattgccggactacgtaaaaaagggacttcaatggccgctgagtcacgtcggaatggattgagttcatccacgctggccaatgcattaacgcgcccgtggccgaaaggagagttgattatcgcgaaagcattgggaacggaaccctgggttatttggccatcgcgttatcacgatccgcgcacgcatgagtttatcgacagaacgcggcttatgagagcgcgtaataaagacaaacagaatgtagagtaagcgcctgtaaaataccccccgcaatcgcgttcgcgggggttattcagcgtacagaaggttattcgcctttcacgcgttcaatattcgcgcctagcgcgcgcagtttgtcttcgatgcgctcataaccgcgatcgatgtgataaatgcgatccacaatcgtcgtgccttccgcaatacagcccgccagcaccaggctcgcagatgcccgcagatctgtcgccataacctgggcgccagagagcgtttctatgccatggcatatgacggtattgctttcaatttccgcacgcgcgcccatgcggctgagttcaggcacgtgcataaaacggttttcaaagacagtttcagtgataaagcccgtcccttccgccaccaggttcagcaacgtgaactgcgcctgcatatcggtcgggaatgccgggtgcggcgcggtacggacattgaccgccttcggtcgtttgccgtgcatgtccagactaatccagtcctcgcccacttcgatatccgcgccagcatcgcgcagtttcgccagtactgcgtccagagtgtccggttgcgcgttacggcagaggattttgccgcgagagatcgctgccgccaccaggaaagtccccgtttcgatacgatccggcagcacacgataaacgccgccgcccagacgctctacgccctcgatcgtaatacgatcggtgccctgcccggcgatcttcgcccccagcgtaaccaggaagttagcggtgtcgacaatttccggctcgcgcgcggcgttttcaatgatggtcgtcccttccgccagcgtggcggcgcacataatggtgacggtcgcgccgacgctgaccttatccatcacgatatgcgcccctttaagacgtccttcgacggaggcctttacgtagccctcttccagcttgatggtcgcacccagttgttccagaccggtaatatgcaaatcaaccggacgcgcgccgatagtacagccccccggcagagagacttgtccctgaccaaaacgggcaactagcggccccagcgcccatatcgaggcgcgcatggtcttaaccagatcataaggcgcgcagaacacgttcacctggctggcgtcaatgtgtaccgatccattgcgttccactttcgcgcctaattggctcaggagcttcatcgacgtatccacgtctttcagttttggaacgttttggatctctaccggttcttctgccagcagagcggcgaacaggatcggcagcgcggcgtttttggcgccggaaattgtgacttcgccctggagcgtcgttggcccctgtacacgaaatttatccattattgtattctcagttaagcattcatctccgctaccggcaggttacccgtagcttaaaatccgttaagtttacgatcgcgcgcccattccgccggggtatatgctttgatcgatacggcatggatacggttgtccgcaatgtactccattagcggcccatagaccgtttgctgtttcttgacccggctcatgccgtcaaacatctcgcccacggcaataacctgaaagtgactgccatcgccggagacgtggacttcctggagggagagggcattcatcagcacactctgaatttcatgattttccatgggttctttattcgtcaaatagtgaaaacagcccaacatcttagagcaaagtcgcgccgtcttaaataagcaaaagattacgctgataaatcagcgcggtaaaagtgccggatggtgctgctaacgcaacttatccggcctacggggatcatgcgaagtgtaggccggataaaccatccggcattcattacatacggggaagtacgtcttcgggcaagttatataattgcgccagcgcgtaaaccttgtcgttaacgccagacagcgacacggcattgccctgcttttttgcctggttcacaaggtgcgccagcagcgccagtccccccgtatccaccctggagatctggctcaggtcgatacgggtaacgccagtcatcgcttctacgcgcgcgtcccatagcggcgccaacacgtcctgatccagctctcccgccagcaccagagtgtccgcctcacgcgtccaggtgagttgcggcgtcattactgtttctcgtccaaagtaattttctgttgagagatagatttcagttgtgcggtcaggccgtcgatgcctttagtacgcagcagatcgctccactcattttgcttggtggtgatcatgctgacgccttccgcaatcatgtcatacgcctgccagttgccggtctgagtgtttttgcgccactggaaatccaggcgtaccggcggacgaccgttgggatcgataatcgttacacggataggcacaatggtcgcatcgcccagcggttgctcaggcgctatctggtaagtctgaccgtggtacatcgccagcgcctgaccgtatgcctgtttcaggtattcgcgaaacgcggcaaaataggcttcacgctgcgccggggtcgcctctttgtagtagcggcccaacaccagcgcgccggcatattttacctgcacgtacggcagaagttcctgatcaacaacgtctcgcaggtaatccggattggcacgaattttcggctgttcgtttttcaggcgatcaaacgttttctgcgccgcctcgttcatcagtttataaggattgctctgatccgctgccgttgctgcgcttaatggcgcaatgaccagcagggccaccatcatcagtcgtttaaacatgcctcaattctcctgagattatttcgtttcgcccgcgggcgttgtggcttcagtatggccttccgttgcggctggcgcatcgccagaattcttattgtcgtcgcctttgctgttataaaggaactggccaatcatatcttccagcaccattgcagacttggtgtcctgaatcgtactcccatctttgaggatagacgttcccagctcaggatcttcaaaaccgacgtttaatgccagatattgctcccccagcagcccggaagtacgaatactcaacgagctggtatcgggaatatggttataacgctcttcgatgtcgagcgttacgcgcggcaggtatgttttcggatcaagcgagatatcttcaacccgcccgacaaccaccccgccgatgcgtaccggggaacgcactttcagaccgccgatgttatcgaaggtcgcataaaccttataggtcggctccgtgcgcatagaggtcacatttgccgccttcaggcaaacaaacagcgccgccagcaacgctaccagcaaaaaaacgcctacccaaatttcattttttttcgtttgcatgaactcaattcccaaacatcagtgcggtcagcacaaaatccagccccagaacggccaacgatgcgtgaaccacggtacgcgtcgttgcccggctaatcccggcagaagttggtattgcgtcataaccgttgaataacgcaatccatgttaccgtaatggcgaacaccacgctctttatcagacagttcaccaggtccatacgccagtcgacggcattctgcatcgcggaccagaagaacccggcgtcgattcctttccagcttacgccgaccagcgagccgccccagataccgaccgccacaaagataatggtcagtagcggcaacgaaatcacgcccgcccaaaagcgcggcgaaatcacccggcgcaatggatcgaccgccatcatctccatactggagagctgctccgtcgcccgcatcaggccgatttccgccgtcaacgccgacccggcccgcccggcaaacagcaacgccgcgaccaccggccccagctcgcgcagcagcgaaagcgccactaacatgccaagactggtctccgcgctgtaagtggtcagaaccagatagccttgcagccccagcaccataccgatgaatacgccggagacaataatgataagcatcgacaagacgcccacattataaagctggcgcaccagcagcggcgcatgtttgcgaaactccggcttaccgataatcgcattgaataacattaacccggcgcgcccgaacgtcctgacggttttgatcccgctgtgtccgagtgctgccagcgcatttaacagcatgagtggcttaactccctgtttcgagtaaatcaaggtgatagtcgcccgccggatagcggaacggaaccggcccgtcggcaatgccgtcaaggaactgacgcacgcgcgggtccgtattctcctgcaacgcctgagcgctaccgtgagcgacgatttttttgtccgccatgatccaggcgtgatcagcaatactgagcacctctggcacatcatgcgagaccaccacgcaggtcacgcccagcgcgctgttcaattctgaaatcagcttcaccagaacgcccatggtaatcgggtcctggccgacaaacggctcatcgaacatgatgagatccggttccagagcgatggcgcgcgccaacgcggcgcggcgcgccatcccaccggagagctcggaaggcatcagttttgccgcgccgcgcagcccgacagcttccagtttcatcatcacgacgctttttagcagcggcgcgggtaaattggtgtgctcccgtagcggataggccacattgtcaaacacgttcatgtcggtaaacagcgctcccgactgaaacagcatactcatacgtttgcggacggtgtagagccgcgaacgggacatggccggcacattctcgccatcaaataagatctcgcccttatccggcgggatctgtccgccaatcaggcgcaacagcgtggttttaccgatgcccgacggccccatgatcgccgtgatcttcccgcgcggcaccgtcagggaaatattatcgaaaatgcagcgttcgccacgggaaaagctgacgtcgcgcatatcgactaaattggccgcagactgacccattgattcatccttcgtattgccttgttgaggtaaccatggcgctgaatttaaccatgggttcgacataattacagaatattaactgacagggttagcgaaagctggcattcgttttactttttagccgcataaagtcaaaattaggacttcgttacggcttccagatatcccttccaggggaccggcgagtatacctgaagaaaggactttagatgcttttagcgatggcgctactcataattggtttgcttctggtggcctacggcgccgatcgtctggtgtttgcggcctctattttatgccgtacattcggtattcccccgctgatcatcgggatgacggtcgtgagtatcggcacctcgctgccggaaattattgtgtcggtcgccgcatcgctacacggtcagctcgatttggccgtcggcgcggcgctcggttctaacatcaccaatattttgctgatcttagggctggcggcgctggttcgtccatttaccgtgcattccgatgttttacgtcgcgaattgccattaatgttatttgttagcgtggtagccggttccgtactgcatgacggacagttaagccgcagtgatggtatctttctcctgcttctggctgtgctatggctgttattcattgttaaaatcgcgcgtctggccgaacgccaggggaatgacagcctcacccgcgaacaactggcggagctgccgcgcgaaggcgggctccccgtcgcgttcttatggctgggcattgcgctggtcatcatgccgatggcgacgcgcatggtaatcgataacgctacggtgctggcgaactatttcgccatgagtgaattaacgctcggtctgacagtcatcgccgtcggcaccagtctgccagaactggcgacggcgattgccggcgtgcgaaaaggcgaaaatgatattgccgttggtaatctcattggcgccaatatttttaatctcgccatcgtgctgggactgcctgcgctgatcgcgccgggggagatcaacccgctggcatttgggcgtgattatagcgttatgttgctggttagcgtggttttcgctttactttgctggcggcatccgcgtcagattggtcggggcgcaggtatactgctgaccggcgggtttatcgtatggctggcgatgctctattggctatcgccacttcttgttggataactggaaacggattatgtcgcatttagcgttgcaaccggggtttgactttcagcaggcaggcaaagaggtcctggaaattgaacgtgaaggcctggcggagcttgatcaatatatcaaccagcatttcacgctggcctgtgaaaaaatgttcaactgcaccggaaaagtggtggtcatggggatgggaaaatccggtcatatcggacggaaaatggccgccacgttcgccagtaccggcacctcttccttttttgtacatccaggcgaagccgcgcacggcgatttggggatggttacgccgcaggatgtggttatcgctatctccaactccggcgaatccagcgagatcgcggcgctaataccggtacttaaacgtctgcacgtgccgttaatttgcattaccgggcgaccggaaagcagcatggcgcgtgcggcagatgtgcatctgtgtgttaaagtgcccaaagaagcgtgtccgttaggactggcgcctaccagtagtaccaccgcaacgctggtgatgggcgacgcgctcgctgtggcgttgttaaaagcgcgcggctttaccgccgaggatttcgctctgtcgcatcctggcggcgcgctgggacgtaagctactgctgcgagtaagcgatattatgcatactggcgatgagatcccgcatgttaataaacatgccaccctgcgtgatgcgctgttagaaattacgcgtaaaaatctcggtatgaccgtcatttgcgatgaatccatgaagatcgacggtatcttcaccgacggcgatttacgtcgcgtattcgatatgggcggcgatatgcgccagttggggatcgccgaggtgatgacgccagggggcattcgcgtgcgtcccggtattctcgctgtcgatgcgctgaatttaatgcagtcccgccatatcacctccgtactggttgctgatggcgaccagttactcggtgtgttacatatgcatgatctcctgcgtgcaggcgtcgtgtagaaactcaaggataattaacgatgagtaaagcaggtgcgtcgcttgcgacctgttatggccccgtcagcacccatgtcatgaccaaagcggagaatatccgcctgctcatcctggacgtggatggcgtattgtctgacggcctgatttatatgggcaataacggcgaagagctgaaggctttcaacgttcgtgacggctatggtattcgctgtgctttgacctccaatatcgaggttgccattattaccggacgaaaggctaaacttgtagaagatcgctgcgccacgctggggattgtccatctttatcagggacagtcgaataagctgatcgcctttagcgatctgctggaaaaactggtcattgcgccggaaaatgttgcctatgtcggcgatgatctgattgactggccagtgatggaaaaagtggggttaagcgttgccgttgcggatgcgcatccgctgctgatcccccgcgctgactatgtgacgcacattgccggcgggcgcggcgcggtacgtgaggtgtgcgacttgttgctgctggcgcagggcaagctggatgaggccaaagggcaatcgatatgagtaaaaccagacgttgggttatcattctactgtcgctggccattctggtactgattggtatcaatctggcggataaagacgatcctgctgccgtgatggtcaacagcaacgatcccacgtataaaagcgagcatacggataccgtcgtgtacagtccggaaggcgcgttgagctatcgtctgatcgcgcagcacgttgaatatttttccgatcaggcggtctcatggtttacgcaaccggtattaaccacctttgataaggataaggtgccgacatggtcgatcaaggccgataaagccaaattgactaacgatcggatgctctatctgtatggtcatgttgaagtcaacgccctggtgcctgacgctcaattacgcagaattaccaccgataacgcgcagattaatctggtgacgcaggatgttacctcgaacgatctggtgacgttatacggcacaacatttaactccagcggactgaaaatgcgcggtaacttacgcagcaagaacgccgagctgattgaaaaggttagaacctcttatgaaattcaaaacaaacaaactcagccttaatcttatgcttgccggctcgctgctggccgccagcattccggctttcgccgtcacgggcgataccgaacagcctattcatattgactcggatcaacagtcgctggatatgcaaggcaacgtcgtgacctttacgggcaacgtggtgatgacccagggcacgattaagatcaacgccgataaagtcgtggttacccgccctggcggcgaacaggggaaagaggtgatcgacggttacggcaatccggccaccttctaccagatgcaggacaacggtaagccggtgaaaggccacgcttcccatatgcattacgagctggcgaaagattttgtggtgctgaccggcaacgcttatctggagcagcttgacagcaacattaccggcgacaaaatcacctacctggtgaaagagcagaaaatgcaggccttcagcgagaaaggcaaacgcgtcaccaccgttctggtgccgtcgcagttgcaagacaaaaacaaaggccagactccggcgcaaaagaagagtaactaattcgttatggcaacattaactgcaaagaatctggcgaaggcctataaaggccgtcgcgtagtggaagatgtcagtctgaccgttaactccggggagattgtcgggctgctcggtccaaacggcgcgggtaaaaccaccaccttttatatggtcgtcggtatcgtgccgcgtgacgcaggcaatatcatcatcgatgatgaagatatcagtctgctgccgctgcacgcgcgcgcgcgccgcggtatcggctatttgccgcaggaagcttctattttccgccgtctcagcgtatttgataacctgatggcggtactgcaaattcgtgacgatttgaccgcagaacagcgagaagaccgcgccaacgagctgatggaagagtttcatatcgagcatctgcgcgacagcatgggacaggcgctgtccggtggtgaacgccgtcgtgtagaaatagcccgcgcgttggccgctaatcccaaatttatcctgctggatgaaccctttgccggcgttgacccgatttccgttatcgacatcaaacgcattatcgagcatctgcgcgatagcgggctcggcgtgctgatcaccgaccataacgtccgtgagacgctggcagtctgtgaacgcgcctatatcgtgagccagggccaccttattgcccacggtacgccgacagaaatcctgcaagacgaacacgttaagcgtgtatatcttggggaagacttcagactctgatagggtagagggctatgctgctctagcgggagaaaacgactctgaatatgaagcaaggtttgcaactcaggcttagccaacaactggcaatgacgcctcagctacaacaggccatccgtctgttgcagttgtctacgctggaacttcagcaggaactccagcaagcgctggaaaataacccgctgcttgagcaaaccgatcttcatgacgaaatcgacactcagcaacctcaggataacgatcctctcgataccgccgacgcgctcgaacaaaaagagatgccggaagagctgccgcttgacgccagttgggatgaaatttacaccgccgggacgccgtccggccccagcggcgattatatcgacgatgagctgcccgtctatcagggtgaaacgacgcagtcgttgcaggattatctgatgtggcaggttgagctaacgcccttctcggacaccgatcgcgctattgcgacatccattgtcgatgcggtagatgataccggctatctcaccgtatccctggacgaaattcgcgaaagcatgggcgatgtagaggtggatctcgatgaggtcgaagccgtcctgaagcgtattcagcgttttgatccggtaggcgtcgcggcaaaagatcttcgcgactgtctgctgatccagctttcacaattcgacaaatccacgccgtggctggaagaggcgcggctcattatctgcgatcatcttgatctgctggccaaccacgatttccgcacgttgatgcgcgttacccgactaaaagaagaggtgctgaaagaggcggtaaacctgattcagtcgctcgatcccagacccggtcaatcgatccagaccggcgagccggagtacgttatcccggatgtgctggtacgcaagcataacggtcgctggacggtggagcttaatagcgacagtattccccgtttacagattaaccagcactatgccgccatgtgcaatagcgcgcgcaacgatgccgacagccagttcatccgcagtaatttacaggatgcgaaatggctgataaaaagccttgaaagccgcaacgacacgctgctgcgcgtcagtcgctgcatcgtcgagcaacagcaagccttttttgaacagggcgaagaatatatgaaaccgatggtactggcggatatcgcccaggccgtcgagatgcacgaatccactatatcccgcgtgaccacgcagaagtatttgcacagcccgcgcggtatttttgaactcaaatatttcttttccagccacgtcaataccgaaggcggaggcgaagcctcttccaccgcgattcgcgcgctggtgaagaagttaattgcggcggaaaaccccgcgaaaccgctgagcgacagcaagttaacctctctgctgtcagaacaaggtatcatggtggcgcgccgcactgttgcgaagtaccgagagtctttatccattccgccgtcaaaccaacgcaaacagctggtttgacccaaccgataaggaagacactatgcagctcaatatcaccggacataatgtcgaaattactgaagccctgcgtgaatttgtgacgacaaaattcgccaaacttgaacagtattttgagcggattaatcaggtatacgtggtgttgaaagtggagaaggtcacgcatatctcggatgcgacgctacacgttaacggcggcgaaattcacgccagcgcggaaggccaggatatgtatgccgccattgacggcttgattgataaactggcaaggcagttaaccaggcataaagataaactgaaacaacactaattgtccgggcagttagccagtgcaggacggcctgttgtgtgacacaacgggccatttgtacagttagcgctccgaacctggccatcaacctgacaggacaggttcttaggtgaaattatgataaataacgatacgactctacaactgagcagtgtacttaaccaggagtgtacgcgtagcggcgttcattgtcagagtaagaaacgcgcgctggaaatcatcagcgaactggcggcaaaacagctcagtttacctcctcaggtcgtgtttgaagccattctgacacgcgaaaaaatgggcagtaccggtattggtaatggtatcgccatcccgcacgggaaactggaagaagataccttacgcgccgtcggcgtgttcgttcagctcgaaacgccgatcgcgttcgacgccatcgataaccagccggtcgatctcctcttcgccctgctggtgcccgccgatcaaactaaaacgcatctgcacacgctgtcgctggtggcgaaacgtctggcggataaaacgatctgccgccgcctgcgcgcggcgctgaatgatgaagagctgtatcaaatcattactgacaccgaaggtgagcagaatgaggcataacaactcaatggcatttctttctgtcgttgtgaggagaaacggtacatggtactgatgatcgtcagcgggcgttccggatcaggtaaatctgtcgctctgcgcgcgctggaagatatgggattttactgcgtggataacctccccgtcgtgctgttgcccgatctggcgcgaacgctggccgatcgccagatttccgccgccgtcagcattgatgtgcgcaatatgcctgaatcacctgagatttttgaacaggcgatgaataatctgcctggcgctttctcgccgcaattgctgtttcttgatgccgaccgcaataccttgattcgccgctacagcgacacgcgccgtttgcatccgctttccagcaaaaatctttctttagagagtgcgatcgataaagagagtgacttgctggagccgttacgctcacgtgcggatctgatcgtcgacacttcagaaatgtccgtccatgagctggcggagatgctgcgtacccggctgttgggcaaacgcgagcgcgaactgacgatggtatttgagtccttcggctttaaacatggtatcccgattgatgcggactatgtgtttgatgtccgctttctgcccaacccgcactgggatccaaaactgcgccccatgaccgggcttgataagccggtagccgcgtttcttgaccgacacacagaagttcacaattttatctatcagactcgcagctatcttgagctatggttaccgatgctggagaccaacaaccgcagctaccttaccgtcgctatcggttgtaccggcgggaaacaccgttcggtgtatattgcagaacagctggcagactacttccgctcgcgcggtaaaaatgtccagtctcgccatcgcacgctggaaaaacgcaaaacatgaccgtaaagcaaactgttgaagtcaccaataagctgggcatgcatgcccggcctgccatgaagcttttcgaactgatgcaggggtttgacgccgaggtgctattacgcaatgacgaaggcaccgaagcggaagcaaacagcgtcatcgctctgttaatgctcgactccgccaaagggcgtcagatcgaaattgaagccaccggcccgcaagaagttgaagcgctggcggcggttatcgcgctgttcaattccggctttgacgaagactaaacctccccctctataccctattttcccccaacgccgtcccggtatttgatgacagtcaccccaaaaccgggcgtgttacgcctgcctgccacttgtcccgcagccccaccctttcgtaagatttgtacatttcgtgcgctttacctatgcataaaaacattaagaaaaccttaaaaaatttcgtttaggttttgtttaagttctttgtccatactaaatttatgtgaataaatttttccaggacttgccatgatccttttatccgaacagactccgctgggcgctggtcgacatcgtaaatgctatacgcatccggataatgcccggcgttgcataaaagttatttacaaccgtgaccacggcggtgataaagagattcggcgtgaactgagctactatgcgcatctgtcccgctacctgacggactggagcgctatcccccgttattacggcacggtagaaaccgattgcggcaccggctatgtctacgacatgattaccgatttcaacggcgcgccctctattaccctgaccgagttcgccgcgcaatgtcgttatgaagaggatgtcgctgtcctgcggcggctactgaaaaaactgaaacgttacctgctggataaccatattgtgacgatgtcgctgaagccgcaaaatatcctgtgccagcgtatcagcgagtcagaagtggttccggtggtttgcgacaatctgggggaaagtacctttatcccgctggcgacctggtcaacatggtgctgtgaacgcaaactggagagagtgtggcagcggtttatcgcccagcctgcgctggccgttgccctggagagggacgagcagccaaaagacaagaaacggctggcgcttacttctcacgaagcttaatggcctgtgcttatcaggcctggacgacacagatcgcaggccggataaggcgttcgcgccgccaatcggcaaaattaattaagctggttgcgcgtcataaaagattccccgcccagttgtcgcatctggcgcataatccacgcctgccggctacgcacatagccagacggcgcattcgccttatagcgtaacggatttggcaataccgccgccagcaacgcggcttcagacacactcaagcgactggcaggtttatgaaaataccgttgtgccgcagcctccacgccaaaaataccatcgccaaactccgcgatattcagataaaccgtgagaatgcgctttttgctccagacagtttcaatgcccagcgttagcccggcctccagacctttgcgcagccaactgcgtccatcccataaaaagagatttttcgccgtttgctgcgaaagcgtagaggcgccgcgaatacggctctcattccgctcattatgcgccagcgctttttcaatcgccggaacatcaaagccccagtgctcagggaacttctggtcttccgccgcaattaccgccagccccatccacggcgagatatccgccatactgacccagtcagaatgcgccacataaccgaactctccgccgagccaggcgctaatctgccgttccgccatcaccgccgaaaaaggcaccggaaccacgctaaacagcgcaatgccgccgccccaaaagacggcgagcgcagcaaggatacgtaaaagtagacggcgcaaaaacgttaacggcgcgatgcgtcgtttgctcattccgccagaaccagcacgcgcgacactaatttatcaatgccgcttgccgcctgggcgatatcctgcgccagcatataggcaggggtggtcacgaccttgttatcctcgtccacaacgatatcatcaaccgggcaaggtacgtgttcggcgcccatctcttcaagtacttcagcggtatcaatatccgtccctattgtcagacgtagcgggaagtcaaagattttcggcaacattgcgggcgcgatacagatgaatcccagcggcttgccggactggtgcatggccttcgccagcgcgacgacatcgctatccacccggcattcgctcccctggctggcgaaattactcaggttcttcgccgcgccgaaaccaccgggcacaatgagcgcatccagttcctctggctgcgcctgggacaggggacgaatatcgccccgcgtaatacgcgccgcctcaatcaggacgttacgcgtttccgccatcgcttcgccggtcaggtgattaatcacatccgcttgtggtttatccggcgcgaagcagacagcctgcgcgccgctgcgggcaatggccaacagcgtcagaacggcctcatgaatttcggtgccgtcatagacgccgcatccgctgagcactacgccaatttttttcatggtgaacatcctcctgcaaccgactcaagcccattaataattttgattaaaatgctacgcttcacacatttaaatgattcatgtaacaaatcatttaggatttgctatcttaactgcgtgcggcctgaaaacaggactgcgcctttgacatcatcataataagcacggcgcagccacgatttccctggtgttggcgcagtattcgcgcaccccggtcaaaccggggtcattttttttccgcgtttgccacccaggctttcagcaccgcgacatcgtgctgccactcctgcttcatctcttcaatccattccgcgacattatcttcccaggcaggaagatccggcgactggatttgctggccaagctgttgcagatgacgcagccctaccgaaccggctgcgcctttaatcttatgcccttcctcaacgacgccttttttgtcacgcgccgtcagattggactccagcacgcttaaatagccgggcatcattttttcaaacaccgcgagaccgtcggtgatcaatttaggcccaaccaactcgatgtactgttccagcatcgggatatccagcagcgcttgcgctttatcgctctcttcaggcgtcacggtactctcctctttatcggtggcatcccagaattttttaatcatcgcggttaaggctggcaccgacagcggcttactcagcacatcgtccataccagcgtccagatactcttttttatctttcagaacgttagccgtaagcgctaccagcggcggtaaatcttcccgcgtgtggcgacgggtcagttctctggcaatatccagacccgtcatatccggtagctgaatatccagcaagaccaggtcatattcgcctggcgcgaacatctccagcgccgccttgccggtcatcgcgacatccacgctgttacccagtttttccagtaccgaacgcgctacgatcacgttcagttcaatatcttcgaccagcagaacatgcagcgccggcagcggcatgtcgtcttcatcaaaggcgtcctccacctcttccgccaccgctggcgcatgaaccgttagcgtaaaggtcgatcctttgcccggcagactggaaacggtaatatcgccgcccatatttttcgccagccgacgggagaccgccagcccgataccggtacccgtcgccggtttaccgccatgactgtctttcacctgataatacatggcgaaaattttatcctgctcatcctgcggaatgccgatcccggaatcttccacttcaaagtgcagcatgtcgccttcatcatagcgcgcccgcaccgtcacctggccctgctgagtaaatttcaccgcattgctgatcaaattccataaaatctggcgcagacgcgttccgtcggtaatgactttgtgcggcagcggcagcgtcggctcaagcacaaaacgtagccctttttgctgcgcctgcaaaccggaaaggttttccagatcggccataaagctggtgaaatcaaccggttggttatcaagctgaaccttacgccgctccatcttatccatatcaatgatatcattgaaaatattgcctaacgtcacggcggagacatggattgtcttaaggtatttttcctgttcggcggtaagatcggtatccagcaggatgcggcttaaaccgacgatgccgttaagcggggtgcgcagctcatgactgatggtagagataaatgtggtcttgtcgcggctggcgcgttccagcgcgtcctgataacgcttacgttcggtaatatcacgaccaaatcccatcaggccatgacgtttaccgacacggtcgtaataaggcactttacgaatttcaaagcaggcctttcgtccgtccgggtaatccagccactgttcgtaggtcagggagacgttatggcggaatactttttcatcggtttcaatgactttctccgccgcttcgggagagtacacatcttccggcttcaaatgcaccagctgtttttcgctcttgccggttagcaattccattgcgcggttacagccggaaaattctttatcctcattacgataaaaaaccaaatccggcgaggcgtccagaaaggagcgcagaaaagaggattgctgttctagctggatttgcgcttcttcacgctctttaatttctacttttagctgttcaaatgtctcttgcagctccgcttccgctttttcgcgatcggcaatttcctgattaagctgggcaatattgtccttcaactgtacgttaagcttgagatcgcgctcgcgcatctcctccagcttttgcaccagacgcgacagtcgctgccttgactcttccagttgttcaacaacaacggataagaaatagaccgcccagggcgtaattaacaggccaaaaaagatggaacgaataacgtcgatactttcaacctgaccatgcagcaccatggtcaccgccatctgcacgacaatcgccagcaccaccaatgccaacgccaggagcatggaaaagcgcaccagacccaatttcatcatcaggtcgacatagtattgcgccagcatacgaatttgcttcatagaggattccttcaccacaacttcgcacataatacccaattatgggaaccgcgttgaatattgtgcgaaatatgcgtagcgcccctcatcacgctacgctacaggtggtatccagggacgggccagcgcagagccctgtacgccatgctcattcaggtatttgtccagctcaaccatccccgtccagcgattctcgcaccacagcggggcaagcagcgtcggacggcgagcgctggctgaaattcggtgataaatcacctccggcggcgtatgacgaatcatctcacctgccgttagcgtgtagtcgtccagttcgatgccgttcagccgccccgcttcccaggctttggccatcgtactgcctttcacaatatgcagcggatgcagtttaataccgtcaacgcccgtctccaccacacgctccatggtttgcaggcattctgcctgcccttctcccggcagccccacaatcagatgcgcacacactttcagcccgcgctcccgggcaatccgggtggtacgctgatagcaggcgaagtcatgcccgcggttaattcggtgcagggttttatcgtgcgcggtttgcaatcccagttccagccatacctcgtagccttgatctttatattcacacagtaaatctactactgcctgcgggacacaatccggacgcgtaccgacgcataacccgacgatactggcctggctgaccgcctgttgatacatggaacgcagcacctgcacttccgcaaaggtgctggtgtaggcctggaaataggccagataacgtttagcgcggttcaccagatgcgcctgatgcgcaagctgctcggcaatcgaatgatgctgctgcgcctcatcggcaaaagaggcgacattacagaaggtgcaaccgccacgcccgatggtgccgtcgcggttagggcagctaaaaccgccatgaagcgtcagcttatgaaccttttgcccataccgacgtaaaagatccccaccaaacatattgactaatttctgtaactgcataatctgatagaccgcctcttaaaaagaggccaaagcctgccatttttagtctcctttggcgatgacctggatcaatcgtcccggaaggcttttatccgttgcataatcaagcaaaataaacgacatttcattcataatcccgttgatgatttttcctgatattcccctcttttttcagcgtctgctgggtcatcgataaaaacagtagcattcaatactgctcacgcttaaaacagcataaaatgccaagatttttgaaaaagaaaggtcagataacgtctggcgagcggctcttatagtgagacagatcacaggctttctgccgctccgtattagcagcccctctataaaaaaccttttaatttcaatatattcaaaaagttatctgtgctacagcacacttttgcataaatcagtttgccatttgacctgggtgtggattcccgataagttggggatccgctggaagctttctggatgagccgtctgctcatcatatttatgcagtaattgagattccctcttaaccgtatttaccaatgcgcaaaggacacaaagagggcgaatgcgaggtaagcgtatgatgcgccagccccgtcgccatgctcttgctgtgcccgcgcgccgtcggttgggagagcgtcccgtagagcctggggaggttcactgatatgttgtacgataaatcccttgagaaggataactgtggtttcggcctgatcgcccacatagaaggcgaacctagccacaaggtagtgcgtaccgccatacacgcgctggcccggatgcagcaccgtggcgcgatccttgccgacggtaaaaccggcgacggttgcggcttgctgttacaaaaacctgaccgtttctttcgcatcgtggccgaagagcgcggctggcgcttagccaaaaactacgccgtcgggatgatctttttgaataaagatcctgaactggccgccgcgtcacgccatattgtcgaagaagaattacagcaggaaaccctgtcgattgtcggctggcgcgatgtgcccaccaatgaaggcgtgctcggtgaaatcgccctctcctccctgccgcgtattgagcagatttttgtcaacgctccggcgggctggcgtccgcgcgatatggagcgccgtctgtttatcgcccgccgacgcattgaaaaacgcctgcagaacgacaaggatttctacgtatgcagcctgtcgaacctggtcaacatttataaaggtctgtgtatgccggcggatctgccgcgtttctacctggatcttgcggatctgcgtctggaatcggccatctgtctgttccaccagcgcttttccactaacaccgtgccgcgttggccgctggcgcagccgttccgctacctggcgcataacggcgagattaacactatcaccggcaaccgccagtgggcgcgcgcccgtacctataaattccagacgccgctgatcccggatttacagtccgctgcgccgtttgttaacgaaaccggttcggattccagctcgctggacaacatgctggaactgctgctggcaggcgggatggacatcatccgcgccatgcgcctgttggtgccgcccgcctggcagaacaaccccgatatggaccaggatctgcgcgccttctttgactttaactccatgcatatggagccgtgggacggtccggcaggcatcgtgatgtccgacgggcgcttcgccgcctgtaaccttgaccgtaacggcctgcgcccggcacgctacgtcattaccaaagataagctgatcacctgcgcctccgaagtcggtatctgggactatcagccggatgaagtggtcgagaaaggccgcgtcggcccaggcgagctgatggtgatcgacacccgcggcggacgtattctgcattccgcggaaaccgatgacgatctgaaaagccgccatccatataaagagtggatggagaaaaacgtccgccgcctggtgccgtttgaagagctgcctgatgaagaagttggtagccgcgaactggacgatgacctgctcgccagctatcagaaacagtttaactacagcgccgaagagctggactcggttatccgcgtattgggcgaaaacggccaggaagccgtcggttcaatgggcgacgataccccctttgccgtgctctccagccagccgcgtattatttacgactacttccgccagcagttcgcgcaggtcactaacccgcctatcgacccgctgcgtgaagcgcacgtcatgtcgctcgccaccagcatcggtcgcgaaatgaacgtcttctgcgaagcggaaggtcaggcccatcgcctgagttttaaatcgccaattctgctgtactccgatttcaaacagctcaccaccatgaaagaggagcattatcgcgctgaccgtctggatatcaccttcgacgtgaccgaaaccacactgaacgcgacggttaaggcgctgtgcgataaagcggaacagatggtgcgcaacggcaccgtgctgctggtcctctcggatcgcaatatcggtaagaatcgcctgccggtccccgcgccgatggcggtgggcgcggtgcaaacgcgtctggtagaacaaagcctgcgctgcgacgccaacatcatcgtagaaaccggaagcgcccgcgatccgcatcactttgcggtactgctcggctttggcgcaacggctatctatccgtacctggcctacgaaacgctggggcgtctgattgatacccaggccatcgccaaaaactaccgtaccgtgatgcagaactaccgtaacggcatcaacaaggggctgtacaagattatgtccaaaatgggcatttcgaccattgcctcttaccgctgctccaaactgtttgaagcggtcggactgcacgatgatgtggtaaacctgtgcttccagggcgtggtcagccgtatcggcggcgcgagctttgatgacttccagcaggatctgctgaatctctccaaacgcgcctggctggcgcgcaaacccattagcccgggcggcctgctgaagtacgtccacggcggcgaatatcacgcctataacccggatgtcgtgcgtaccctgcaacaggcggtacagagcggcgaatacagcgattatcaggaatacgccaaactggtcaatgagcgtccggcggcaacgctgcgcgatctgctggcgatacatccagacggcgaggcggtgactatcgacgaggttgagcccgccagtgagctgtttaaacgctttgataccgcagccatgtctatcggcgcattaagtccggaagcgcacgaagcgctggcggaagcgatgaacagcctcggcggcaactccaactccggcgaaggcggcgaagacccggcgcgctacggcaccaataaagtgtcgcgtatcaagcaggtggcttccggccgttttggcgtgacgccagcgtacctggtcaatgccgatgtgattcagattaaagtcgcgcagggcgcgaaaccgggcgaaggcggtcagttgccgggggataaagtcactccgtatatcgctaaactacgctattcagtgccgggcgtgacgctgatctccccgccgccgcaccacgatatttactctatcgaggacttagcgcagctcattttcgacctcaaacaggtcaacccgaaggcgatgatctccgtgaagctggtgtccgaaccgggcgtcggcaccatcgcgaccggcgtggcgaaagcctatgcggatctgatcactatcgccggctacgacggcggtaccggcgccagcccgctctcttcggtgaaatatgcgggctgtccgtgggaactcggacttgttgaaacccagcaggcgctggtcgccaacggtctgcgtcacaagattcgtctgcaggtggacggcggtctgaaaaccggcgtcgatatcattaaagcggcaattctcggtgcggaaagtttcggcttcggcaccggcccgatggtggcgctgggctgtaaatacctgcgcatttgccatctgaacaactgcgcaaccggcgtggcgacgcaggatgaaaaactgcgtaagaaccactatcacggcctgccgttcaaggtaaccaactactttgaatttatcgcccgcgaagtgcgcgagctgatggcttcgcttggcgtgacccgcctggtggatttgattggccgcaccgacctgctgaaagagctggagggcttcaccgctaaacagcagaagctggcgctgtctcgtctactggaaaccgctgaacctcatccgggtaaagcgctgtactgcaccgaaaataacccgccgtttgataacggcgtgctgaatgcgcaactgttgcagcaggcgaaaccgtttgtcgatgcgcgccagagcaaaaccttctggttcgacatccgcaacaccgatcgttccgtcggcgcgtcgctttccggctacatcgcacagacccacggcgatcaggggctggcttccgatccgattaaagcgcacttcagcggtaccgcaggccagagctttggcgtgtggaacgcgggcggcgtagagttatatctgactggcgatgccaacgactatgtcggtaaaggtatggcaggcggtttgatcgccatcagaccaccggtaggttccgccttcctcagccataaagccagcattatcggcaacacctgcctgtatggagccaccggtggccgtctgtacgcggcgggccgcgcgggcgaacgtttcggcgtgcgtaactccggggcgattaccgtagtagagggcatcggcgacaacggctgtgaatacatgaccggcggcatcgtctgcgtgctgggtaaaaccggcgttaacttcggcgcggggatgaccggcggcttcgcctatgtgctggacgaagatggcgaattccgtaaacgcgtgaacccggaactggtagaagtactggacgttgattcgctggctatccacgaagagcatctgcgcggcctgatcaccgagcacgtgcagcatactggttcgcaacgcggcgaagagatcctgtccaggtggtcaagcttctcaacccaattcgcgttagttaagcccaagtccagcgatgtcaaagccctgttgggccaccgtagtcgtagtgcggcagaattgcgcgtgcaggcgcagtaaggaattgaaatgagccagaatgtttatcaatttatcgacctgcagcgcgttgatccgccgaagaaaccgctgaagctccgtaagatcgagtttgttgaaatctacgaaccgttttctgaaggtcaggcgaaagcccaggcggatcgctgtttgtcctgcgggaacccctactgcgagtggaaatgtccggtacataactacatcccgaactggctgaaactggctaacgaagggcgtatttttgaggcggctgagctatcgcaccagaccaacaccctgccggaagtgtgtggccgcgtctgcccgcaggaccgcctgtgcgaaggctcctgtacgctgcacgatgagttcggcgcagtgaccatcggtaacattgagcgctatatcaacgataaagcgtttgagatgggctggcgcccggatatgaccggcgtacgccagacggacaaacgggtagcgataatcggcgcaggtccggcagggctggcgtgcgccgacgtgctgacccgcaacggcgtgaaggcggtggtctttgatcgccatccggaaatcggtggtctgctgaccttcggtatcccggccttcaagctggagaaagaagtcatgacccgccgccgtgagatcttcaccggcatgggtattgagttcaaacttaataccgaagtgggtcgtgatgtacagcttgaagatctgctgaaagattacgatgcggtattccttggcgtcggcacctatcagtcgatgcgcggcgggctggaaaatgaagatgcggacggggttttcgacgctctgccgttcctgatcgccaatacgaagcagatcatggggtttggcgaaaccagcgacgaaccatatgtcagcatggaaggcaaacgcgtggtggtgctgggcggcggcgataccgcaatggactgcgtacgtacctccattcgtcagggcgcaacgcacgtaacctgtgcttatcgtcgtgatgaagagaacatgccgggctccagacgcgaagtgaagaacgcgcgcgaggaaggtgtcgaatttcagtttaacgttcaaccgctgggcattgaagtcaatgccaacggcaaagtgagcggcgtaaaaatggtgcgcactgaaatgggcgaaccggatgccaaaggccgtcggcgggcagagatcgtcgccggttccgagcatgtggttccggctgatgcggtggtgatggcgtttggttttcgtccacacagcatggaatggctggcgaaacacagcgtggaactggactcgcagggacgaattatcgcgccggaacgcagcgataatgctttccagaccagcaacccgaaaatcttcgccggtggcgacatcgtgcgcggttccgatctggtggtgacggcgattgccgaaggccgtaaagcggctgacgggattatgaactacctcgaagtataacccttccggctccccgcttactgccttggctgatggctggggagccgatattcctctcctcaatatctctcctgccgattctggaaacccgctcgtaaatcgagatgtaatgccatgtaaaatccgttcatggattgatccgtttacgcctgaagcgtattgatagcgttctaatttcacaataaaactatcacgtaagggatgacatgacgaatccaactttagtgccacagtctgatgaatatcagcaaattcatgacggtattattcgtctggtcgatacggcacgtaccgagaccgtgcgcagcatcaatgccattatgactgccacctactgggaaattggccgacgcattgtcgaatttgaacagggaggagaagcgcgagcggcctatggtactcagcttatcgaacgattatcggtagatttaagtcagcgctataagcgcggtttttccaccagaaacctatggcaaattcgtacattttatctttgttttcaacacattgaaattccgcagacactgtctgcggaattttcaaatctcataccgctcgccaaaacattccctcttccctggtcagcgtatgtccgcctcttgtcggtaaaaaatcccgatgcccgcactttttacgagaaagagacgctacgtaacggctggtcagttaggcagctcgatcggcaaatcgccactcagttttacgaacgaacgctactgtcccacgacaaatccgccatgttgcagcagcctgcacccgccgagccaaacgttttgccggagcaagccatacgcgacccgttcattctggaatttcttaacctgaaggacgagtattccgaatcagatctcgaagacgcgctgctcagccacctgatggactttatgctggagctcggtaacgattttgcttttgttggccgccaacgccgactacgcatagacgatagctggttccgcgtcgatctgctgttcttccatcgtcgcttgcgctgcctgttgctcgttgacctgaaagtaggcaaattcggttatgcggatgccgggcagatgaatatgtacctgaactatgccaaagagcactggacaatgcccggagaaaacccgccagtcggcctggttttgtgcgcagggaaaggcgcgggggaagcgcattacgcgctgactggcctgccaaacaccatcatggcgagcgagtacaaagtgcagttgcccgacgaaaaattactcacagacgaacttattcgttcgcaaaccatgctggaaactcaactcacacgcggtggttcactgacaacggagaaaaactaacgaaccattaatatcatgaataattatcaaaaaaatatcatacgaaaacgtttgctttattctgagaactgtatattatgcggcggattttttgggcaaaattcatggaggcgttgtgtcgcaggacaacaattatagccagggccccgtccctctggcggcgcggaagggcgtgattccactgacgtttgtcatgttgggtttaacgtttttttccgccagtatgtggaccggagggacactcggcaccggtcttacctatcacgatttcttcctcgcagttctcttcggtaatctcctcctcggtatctacactgcatttcttggttacatcggcgcaaaaaccggactctccacccacctccttgcacgttactcctttggcgttaaaggatcatggcttccctcgctgctgctaggcggcacacaggtaggctggtttggcgttggcgtagcgatgttcgctattccggtcagtaaagcgacgggcattgatgccaatattctgattgccatttcgggtctactgatgaccctgaccatttttttcggcatctcggcgttgaccattttgtctatcattgccgtacccgcgatcgttatactgggcagctactccgtctggctggcggtcagcggcgtgggtgggctggagcatttaaaaacgatagtgccgcagacgccgctggatttttccagcgcgctggcgctggtggtgggctcgtttgtcagcgccggtacattgaccgccgacttcgtccgcttcgggcgtcatgccaaaagcgccgtactgattgcgatggtcgcttttttcctcggcaactcgctgatgtttatctttggcgcggcaggcgctgccgccgtcggtcaggcggatatctctgacgtgatgatagcgcaggggctgctgctgcccgcgattgtggtgcttggcctgaatatctggaccaccaacgataacgcgctgtacgcatcgggtctgggcttcgccaatattaccggtctttccagccgtacgctgtcggtggtgaacgggattatcggtaccgtgtgcgcgctgtggctttacaataattttgtcggctggctgacgttcctgtcatctgccatcccaccgattggcggagtgattattgccgactatctgttgaaccgccgccgctatgccgacttcaacaccgtgcgctttattcccgttaactggattgctattctttccgtcgcgctgggcatcgccgccggacattatgttccgggtattgtgcccgtcaacgccgtactcggcggcgtcttcagctatatcctgctgaatccacttttcaaccgcagccttgctaaatcaccagaggtcagccatgcagaacaataacatcactattcgtcagacgcgtctgcagggacacgaaggattatggcagattacgattgaaaacgggcgctttagccggattgagcctcaggaagccgcatcgttaccgcagggcgaagtgcttgatgccgaaggcggcctggctattccaccgtttgttgagccacatatccacctggataccacgcaaacggcgggtgaaccgagctggaaccagtccggcacactgtttgaagggattgagcgctgggcagaacgtaaagcaatgctcacgcatgaagatgtgaaagcgcgcgcgatgcagaccctgaaatggcagatggctaacggcatccagtacgttcgtactcacgttgacgtttcagatcctacgctcaccgcgctgaaagccatgctggaagtgaagcaagaggttgcgccgtgggtagacctgcaaattgtcgcctttccgcaagaaggtattctgtcttatcccaacggtgaagcgctgttagaggaagccgtgcgtttgggcgttgacgttattggcgccattccgcactttgaatttacgcgtgaatatggcgttgaatcgctgcacaaaaccttcgccctggcgcaaaaatacgatcgcttgatcgatgtgcactgcgacgaaattgatgacgagcagtctcgctttgtcgaaacggtcgcggcgctggcgcatcgcgatggcatgggggcgcgcgtgaccgccagccacaccacggctatgcactcgtacaacggcgcgtatgcgtcacgcctgttccgtctgttgaaaatgtcggggattaacttcgtcgccaacccgctggtgaatattcatctgcaaggacggtttgacacttacccgaaacgtcgtggcgtcacgcgagtgaaagagatgctggaagcggggatcaacgtctgctttggccatgatgacgtcttcgatccgtggtatccattaggcacggcaaatatgctgcaggtgctgcatatggggttacacgtttgccagttgatggggtatgggcaaatcaacgacgggttaaatctgatcactacccacagcgcaaaaaccctgcatttacaggactacggtctgagcgtcggcaatgccgcgaatctggttatcttacccgctgagaatggattcgatgcggtacgtcgccagacgcctgcgcgttactcgattcgccacgggcgagtgattgccgagacggtgccgagccagacgacgctgcacctgacccagccggaagccgtgacgtttaagcgttaacccgtcatacccgcgctctccggcacattcaccacgcagcccgtaaggggctgcgttcggaagactgctccggcaagagattcaggccgccagcagactggcgcgtactttcactaccactttcttgatgtcatccggctcacccactgcacatcccggtttatgcggttctcctggcataaacacagcaaacatccccgcttgcagcgtaatagtctgctcgtcgacaatttgactacaaagctggtaatcctcttcaacgtgcatctcctcgcactggcgagcggcaccggacatcccaaacgcaatacgctcgacgccggttagtagtagctgaatatcaatgtattgttcatgcaattccgctttcttctcggccggcatttgcgtcgttaactgcattacattcataaagacattgtcgccctgcaattcatagcgccccggcgctttctcctgcggccttgccgccagcgcgagagtcaaggcatccaacaatcgcggatgcaacccgcaagaaggcaacgactgtacttcccccatcatcataatgtgtctccttgagctaacaacgcagcgcctaataatcctgcgtcatgccgatagcgagcggcgctcagcgccacgtgataaggcgcaggctcttgcatcaaaaacgcgcgaacctgctccaggtatccctcagctaaccctacgctgccgccaatgaccacacactggcagtcggtagtcgctttcacatcggcgatcattcgcgctattacctgcgcggattggcttaccagatgtcgcgcctgctgatgaccttcgccagcgcgaataaatagggttttggcgtcgcatcccgccagatcgtcccgcgccgccgcggccatccctcgtccagaggcgatggcctctacgcagccaacgcgtccacagccgcatacgggcccgtgtgggtccgccagggtgtgtcccaggtgcccggccagaccgccttttccggtaaggagcttgccgtcgcagacaacgccgccgccaacgccggttgaaacggtgataaataccatatcgcggatatcatcagggagcgcgtgatactccgcccaggccgccgcctgcgcgtcgttcaccgccagcgtcggcaggccagcgatcgtttccagtgtttgtactaacggaaagtgtagcaatccgcccagattatgggggtttagcgccagcagcatcccttcctgaatgatcccggtagaagctatcgctacctgacgcgcctctgcccgtagtggttcaaccagcgcctttaatgcttcacgtaacgcatccggcgttttgctcgcgggggtcggtagctcgcgacgctggctaatgcgcaagtttttgtcgatgagcgcggcggcaagtttagtaccgccaatatcgattgctaacgtagtcatgacgccgccttttttaatgcgtcgttataccatccacagatatgttccagacgggtaatggcggaccccaccgtcaccgcccatgcgccatagcggatcgcctccgctgccagtgctggcgagttatagcgcccttcggctattacccggcatccggcgtcatgcaacgctttgactaagggcagatcgggttcctccggcgtatcgggggtggtgtagccggacattgtcgtgccgataatgtccgcgcccaaccgttgacaggcgagaccatcgtccacggatgagcagtcggccatcgccagtagatggtggtgatgaatgcgcgccaacaacgcctcaacggctaccggccgttgccgagcggttccatcaacggcgataatagctgctccggcctgtgccagcgcatctacatcgtcgagaaaaggggtaatgcgcactggagagtcgtccagatcgcgtttgataatgccgataatgggtaccgaaacgagcgagcgggtcatacgcaggttgtctatgccttcaatacgcaccgcaaccgcgcccgcctgttccgctgccaacgccattgccgctacaatctccggcttatccagcggactgcccggaacgggctggcaggagacaatcaggccgccagaagcggcaatatttttatccagttgttcaagtaacgacatactactcccttacaaatattgcccggttgaaaaccgggcaagcggattaacttttcgtttttacaaaggcacctttaccactgccaagcggtacggctccgctgaacggtttgtcgtcaatagcatcgtgggtgcgtaacgcttccggacgtagccaacgctgtacgcgagacggcatatcaagcccaataagcaggatcacgacaaacgtcaggctgaaagagagcgatgccagcgcagtgcccaaatccagacgttgagcgatcagcgctcccaggatcggcgccagcgcgccgccgagcgcgccgacgttataagtaaagcccagccccgccgcgcgctgatcggtatcgaagtaaccgccgatcagtttcggtagaatcccggcaatcccctgccccaacatctgttggaaaaacagtagcagacccagaacccagacgtttgtgccgccaatcgcaaagaccggaataatgaggatttgcgaggccagcaggctacagacatatgctttacgcgttcccagccagtcgccaagaaaaccgcctacgcagcaaccaaccgccgcgccaaatccgctaaagaacaggacattcgccaccgtatgcggatcgtaggccagctcggttttcagataagtgggtaatagcgcctgaatcggccaggaatagaggaaagcaaacagtaccaccagcatcagcatgacgccagtgggccagcgtttaccgctgctctgcaccataaagctgataaagataaccgcgcacagtagtcccagccccgccacaatcgcagcattttgtaggttaccggcaaaacagaaccacagcgcagcggcggcggcgaaagtcattaaaatgttgatgatgcgatgctcgccccgataaagaatgtcgaccatcgtgcgtaccggcgctttacccgcgtgtttctctttccagtcttccgcttccggaatgtttttccgcagccagagagcgaagataattggcaaaatgccaatgaaaaacagcgcgcgccagccccagacaggcaccaccaggctgtacacctgcgcggcaacgaccgcgccgacggagaagccggaaatcagaaaaccgctggctttattgcgtaaatgttttggccagctttcaatcacataggtcgcgctggaaccatattcgcccgccatgcccataccaatcaccagtcgggcgatgaacatggtggtgtaaccgggcgcaaacccgcatgccagggttcccaccgaaaacagaatgatgctgctgaccatcgccagacgacgcccatagcgatcgcccatcgcgcccagtaataacccgccgaaccagcgagagataaaagccgcagaaatcaggcttgccgcctgtaccgtcgtcagcccaaattcgctttgtacctcagtcagtacaagagcaatcaacacaaaatcaaaaccatcaagcagatatcccagccaggcagcggaaaatgcccgccactgcgcccggttgagatggcgataccacgggatgttctgggtagaagtactcattttactctcccgacgatttttgttgtcgttatgccgaatggcggctccgccttatccggcctactgttcgcactgttgtaggccgggcaagcgtagcgcccccggcattatgctgttacgccttttcttccatcagttgttgagccagcgccttgagcgccggcaggtatttttcatcaacaggcgcaaacggtttacgacacagcggcaccgatagcacgtccatataatgcaggaccgttttcaggccgcggaatacgccggttttaatcagtaaatcaataaccttattgcactcggtttgcaggcgctgcgctttcgccacatcgccctcacgtaatgcctgaacaatcccctgataacgccagcccataatgttgtatgtgctgccgataccgccgtccgcgcccgccagcagaccggaagcgaagatttcgtcataaccgttgtacagcaccagatccggatgcgcgcggcggatctgctccatctggaagagatcgccggaggtttgcttcagcgcgctcacgcccggtaatgtcaccagcgtattgatctgatcgagggtaagttttacgccgcttaacgccggaatgttgtataccaccatcggcaatccatctgcggaatcaatgattgcccgataatggtcacagtgctcttcaaaactgaaagggtaataaaaaggcgtcaccgcagagaccgcatcaaaaccgtaacgctttgcggcgctggcaagctgctggctttctgcggtgcttactgtcccgacatgggcgatcaacgtgatttttcccttcgcctcttcggcgacaatctccagtacctgctctctttcagcaaggctctgtacgaatgcttccccggtggaaccgccaacgtacagcccgtcgataccctgcccaatgttaaaacgcaccagacggcgcaggctttcgctatccagttgctgctgatgatcaaatggggtcaacaacgccgccattacgccttgcaatgcttttgccatacctacctctacggatgatgaatatattaactacctacctttatacctgttataccagatcaaataagcagcaaataatacagaacgcttatagtgcgatctgcttcactaaaccgggatcggaggtgcgatcgctaccgcattttttgactttttttaccgagtgcgtgccaggtagcggaaacgctattgaggtgggtttgcagagcgcgatccgctttatcgggatctcgctggcgaatggcatcaacaatcacaatatgctgttgataactcacgttattatgttcatgcagctcacgatcgggaacgcttgggcgagcggcgattagccagtccagcagagcaacatgaatagccataaagatcggattgccgggaatttcagccaacacccggtgaaactcgacatccgaacgaataaacagcgcgttgtcatccagcgactggctattaatttccagcgctttcgttaacaacgcgatctgctcgtcggtggcatgttccgccgcatagcgtaccaggctggattcaaagaaaagccgtagctgttcaaagtgagcgatgccgccaggatgagtaagaaaatctttcgccatacccgacagttcgctgatgatggtatcagcagaggggcgcgagacgcgggcgcgttcgccgttattgatttgcaccagacctttacgcttcagcgcagctaacgcttcacgcacggagggacgtcccacattgaagaaggccattaattcacgttcagacggtagctgttctccctcgccaaactcatgacggcggatcatctgctccagctcttcctcaaccatttcagacagttttttacgcgccagcgggcggcggcgcaaactacgcccgagggatgtcggtgaatcttctgcttgcgaatcaaatgcgttcataacgtccattcatgagtggtcggtggcaaataatagcaagcttatcgtaacacagcttcaaaagcagggtgaacccgcgaggaggccaaacaaaacaggcccttcagggcctgttgattattttactacgcgcagtgccggacgtccgccacgcggcggaggcggctcgtcatcaggactactgtcgtcatcgtggtcgggcttatcgccatcaatgacggacatcacggtctcgctttccgcgcctgcggtattgtcatcatcatttaagctgacaacgtcttcatcataggcggcttcaggctcaaacatggtgcctgcgccgttttcacgggcgtaaatcgccagcaccgcagccaaaggcacagaaacctgacggggaacgccgccgaagcgcgcattaaaacgcacttcatcattagacagctccagattacctaccgcccgcggcgcaatattgaggacgatttgcccatcgcgcgcatattccatagggacatgcacgccaggcagcatcacatccaccaccagatgcggagtcaactggttatccagcaaccactcgtagaaagcacgcaacagatagggacgacgcggcgtcaactgtgacaaatccatacaggttaaccccgaccgaggcgcatttcacgttcagcttcggttaaagaagccaggaaagaatcacgttcaaagacgcgggtcatatagcctttcagctctttcgcccctgcgccgctgaattcaatacccaactgcggtaaacgccacaagagaggcgccaggtagcaatcaaccaggctgaattcgtcgctcaggaaatacggtttctgaccaaataccggcgcaatcgccagcagctcttcacgcagttgtttacgcgcagagtcggcctcggaagcagacccgtttacgatgacgttcatcagcgtataccagtctttttcaatacggtgcatgtacagacggctttcaccgcgcgcgaccggataaaccggcatcagcggcggatgagggaaacgctcatccagatattccataatgatgcgagattcccacagggtcagctcacgatccaccagtgtcggaacgctttgattcgggttgaggtcaatcagatcctgaggtggattgtccttttccacatgttcgatctcaaaactaacacccttttcagccaacacaatgcggacctgatggctatagatgtcagtaggaccagaaaacagcgtcattaccgaacgtttgttggcagcgacagccatgaaaacctccaggtatattcagaatttttactgctaccagccacaatgtgaccagccagatgttatgtcacccagggcgaaaaaagccatcattgctcagaaacgagacaaaaaatgaacattccccgctatttgggcagaaaattggatgatagtttaccagattttgtgacctttgtggtgagtcgattctggaaatgaggaaaaagagatattcctggtctgaaatgctcgccccacctgagatattgtctttcgcctgttatgcctgtactaccggtgcgccccagccatcaaaactgccgccatgtttttcagccagatcggtaagctggcaagtgatttctgtcatatgccattgttgcggagcatcggtgctgataaaagacgccataaacccctgttgcgggtcattcattcgaatactgaccagcgttatgccatacggtaatgcagcaatatcttgcgccaagtcgcgcgctgcgacctctgtaggcaatgtcgcataataatcaatagcgcgcggaagcgtcagatcatcaccttgttcctgtaatccccggcacacacgggaatcgtgtatccagttccagtcgtatcgggttggatacaagaactggcggtaaaagtttcctttatcattgtgactctctctataactaaaagagatttccgggccaccagcgagcaatttatccagcgtcttttcccagttaagatcctcttccgacatgaacacaaaatcgcgccagccttgttgggtaaccacacccaccagccagatcggaaacgtcttccccttttcatcaagccagtcctctatacgatttaaacgctgtgtttcatcgggctgcggtaaaccattttcataacagttggtgtaatgaacacgtaagaacccggtatggataaggcgatcaaatttttcatcctgaatggcgccgatatccacacgtatacccgtaacatggtcatccaccgttgttataaagaattcccatttattcgacagcattaacgactctttcttagtaaacaatgagttaaaaaatcccactgcgacttccttttctctgagcgtgcatgaaagatgaataagatgagaataatgctaaagatagggaggaaaagagactggattcggactttagccataaaaaaacccgccgaagcgggttttttcgctaacagttgtctgccgaagcagaaccccattaacgtttggagaactgcggacgacgacgtgctttacgcaggccgactttcttacgttcaacctgacgagcgtcacgagtaacgaagccagctttacgcagttcgccacgcagggactcgtcgtactccatcagagcgcgggtgataccgtgacggatcgcaccagcctgaccagagataccaccacctttaacagtgatgtacagatccagtttctcaaccatgtcgaccagttccagcggctgacgaactaccatgcgggcagtttcacgaccgaagtactgttccagagaacgttggttgataacgattttaccgttgcccggtttgatgaacacgcgagctgcggaacttttgcggcgaccagtgccgtagtattgattttcagccattgcctataatcccgattagatgtcaagaacttgcggttgctgtgccgcgtggttgtgctcgttgcccgcgtaaactttcagtttacggaacatagcacgacccagcgggccttttggcagcatgcctttaaccgcgatttcaatcacacgctcaggacggcgggcaatcatctcttcaaaggtcgcttgtttgataccaccgatgtggccggtgtggtgatagtacactttgtcagtacgcttgttgccggttacagcaactttgtcagcgttcagaacgatgatgtaatcaccagtatctacgtgcggagtgtattccgctttgtgcttaccgcgcaggcgacgagccagttcagtagccagacggcccagagttttaccggtcgcgtcaacaacataccagtcgcgttttacggtttctggtttagctgtaaaagttttcattaaaagcttacccaaataaataagttacacgttggtgaacacccaaacgttttaaatagttgaggttcacacgacaaagtccggtaaacctaccccctcggatatgtttggccggcacagagaaagtttgggaaaaaactctcttgtaacgtggggtcgcaggattatagagaagtccaggtcaaagatcgacccctttttgcgatttgccgcgggttttgttcaggcctggttcaccctcggtcggggaggttgcacagatataataccgcataatgccggggcgctgcgcttgtccggcttacggcatatgctcccgcttgaggtactccgcactctgcatctcttgcaggcgtgacagacagcgctgaaattcaaacttgagctgttccccctgataaatttcatataacggtgcggcggcgctgaccaccagcttaacgtggcgctcgtaaaactcatccaccagcgcaataaagcggcgcgcttcgttctccatcagcggcgtcatgaccggcacgtcaaacagcagaaccgtgtgaaataaccttgagagcgcaatgtaatcatgctggctgcgggcctcgacgcacagcgtagcgaaagagaccgctagcgtttggttttcaacgcccagggtggataaagagcgatgattgatttccagcgtcggagcgtgctcgcgcgcggcccccgctaacgccagccacagtttatccatttgccgccgggtttcatcattaagcggcgttagccataaatgggcctgcgtcagcgtccgcagccggtaatcgacgccggcgtccacattcataatgtcgcagtgctgtttaatggcatcgatagccggcaggaagcgggcgcgttgcaaaccgttgcggtagagttcatccggcggaatattggaggtcgcgaccagcgtaatgccgcgtgcaaacagcgctttcattaaaccgcccagcagcatggcgtcggtaatatcggtgacgaaaaactcatcgaaacacagtacgtccgtctcggttttaaaccgatcggcaataatgtctaacggatcgatctgtccctgtagcgcggtaagttcttcatgcacgcgcagcataaaccgatgaaaatgcaggcgtaattttcgctcacccggcaggctgtggtagaagagatccatgagccaggttttgccgcgacccacgcccccccacatatacagcccgcgaaccggtatttgcgcgtccggttcgtttttgcctaataatttccccagtcgcgctatcagtccgccgggtggcgtagccgacgattttttcgcggtgagcgcctgataaagggtttccagacggtcgaccgcctctttctgtacgtcgtcaggctgatgggtgccttcgttgagtgcctggagataacgcgatgtaggggaaaggctttgcataatgttattgttattccttgaaaatcgatgtgccgtcgttcacggctgacgaaaaaaaggccgttctacactacgcgatatgctgtcgggattccacttctacggaattagcggttatagtggcataatcaggcgcgggcatggagcctggagccaacaccctacggaaacataagacaacgggagatgttcatgacctgggaatatgcgctaattggattagtcgtcggtatcatcattggtgccgtggccatgcgttttggtaatcgtaagttacgtcaacagcaggcattgcagtacgaactggaaaaaaacaaagctgagctggaagagtaccgtgaagagctagttagccactttgcccgcagcgcggaactgctggataccatggcgcatgattaccgccagctgtatcagcatatggcgaaaagctccagcagcctgctgccggaaatgtctgcggagtcgaatccgttccgtaaccgtctggcggagtctgaggcgagcaacgatcaggcgccagtacaaatgccacgtgattattctgaaggcgcgtctggcctgttacgtagcggcgcaaagcgcgattaatcgcacgccgttaagaaatttatcgggcgcatcgcttgcgccctctctctatctttcctgtcccagctattatcattgttaccaggctgaaaattcaataacatcaatctgttttgaattgtctatccgttcattcaaggtacgagagcagcatccatgaaaaaacacacccagctgttaagtgcattagcgttaagtgtcgggttaactctttcggcgccgtttccagcccttgcatcgataccaggccaggtgccaggccaggcgacgctgccaagccttgcccctatgctggagaaagtgctgcctgctgtcgtcagcgtaaaagtcgagggaaccgccgcccagagccaaaaagtgccggaggagtttaaaaaattctttggcgaggatctgccagaccagccgtcccagccgtttgaaggactcggttcgggggtgattatcgatgccgcgaaaggctatgtattaaccaataatcatgtgattaatcaggcacagaagatcagtattcaactgaatgacggacgcgaattcgacgcgaagctgatcggcggcgacgaccagagcgatatcgctctgttacaaattcagaatcccagcaagttaacgcaaattgccatcgccgattccgacaaactccgcgtcggcgatttcgccgtggcggtcggtaatccgtttggtctaggacaaaccgccacctccgggattatttcagcgctgggacgcagcgggcttaatctggaagggcttgagaactttattcaaaccgatgcctctattaaccgcggcaactccggcggcgcgctgcttaacctgaacggcgagctgatcgggattaataccgcgatcctcgcgccagggggcgggagcatcggcattggctttgctattccttccaatatggcgcagacgctggcgcagcagttgattcagttcggcgaaatcaaacgcggattgctgggaattaaaggcactgaaatgaccgctgatatcgctaaggcattcaaactgaacgttcagcgtggcgcttttgtcagcgaggttttacccaattcaggttcggcgaaggccggggtgaaatccggagacgtgattatcagtcttaacggtaagccgctgaatagctttgccgaactgcgttcgcgtatcgccaccaccgaaccgggcacgaaagtgaagctgggcctgctgcgcgatggtaagccgctggaggtggaagtcacgctggattccaatacctcttcttccgccagcgccgaaatgatcgccccggcgttgcaaggcgcgacgttgagcgacggccagctgaaagacgggacgaaaggcgttaaggttgatagcgtcgaaaaaagcagtcctgccgcgcaggccggtttgcaaaaagatgatgttatcatcggcgttaaccgcgatcgcatcagttctatcgccgaaatgcgcaaagtgatggcggcaaaaccgtccatcattgctcttcaggtagtacgcggcaacgagaacatttatctattgctgcgctaatcctgtcttaaaccgggcatcagcctgcgatgtgatgtccggttaactcatggtatgctgctgccgttcccttttttaacgacgcctccatcatgtttgtgaagctcttacgttcggtcgcaataggtttaattgtcggcgctattctgttggccgtcatgccttctttgcgcaaaattaatcctatcgccgtcccgcaattcgacagtaccgatgagacgccagccagttataattttgcggttcgccgcgccgcgcctgccgtcgtcaacgtctataaccgcagtatgaacagtaccgcgcataatcaactggagatccgcacgctaggttccggcgtgatcatggatcaacgcggttatattattaccaacaagcacgtgattaacgatgccgatcagattatcgtcgcgctacaggatggccgcgtctttgaagcgctactggttggctccgattcgcttaccgatctggcggtgctgaagatcaacgccactggcgggctgcctaccatcccgattaatacaaagcgtacaccgcatattggcgacgtcgtactggctatcggcaacccatataatctgggacagaccatcacccaggggatcatcagcgcaacgggtcgtatcggcctgaacccgacggggcgacagaattttctccagaccgacgcctcgattaaccacggtaattccggcggcgcgctggtcaactcgttaggcgaactgatggggatcaacaccctctcttttgataagagtaacgatggcgaaacgccggaaggccttggttttgcgattcccttccagctagccacgaaaattatggataagcttatccgcgacggtcgcgtgattcgcggctatatcggtattggcggacgagaaatcgcgccgctgcacgcgcagcagggtagcggcatggacccgattcagggcattgtcgttaatgaagtgacgccaaacggccccgccgcgcttgccggtattcaggttaatgatttgattatttcggtcaataataaacccgctgtgtccgcgctggagacgatggatcaggtggcggaaatccgcccgggctccgtcattccggtcgtggtaatgcgggatgataagcagctcacgttccaggtgacggtgcaggaatacccggcgtcgaactaaaacgacgcggcttttgcccgcgtcgttcgacgactagtcaataaagactggccctgccggaaaatgcgccaggaaactcgtgaagatcagcagagcggggagacttttctccccgacggcttcttcacgcagcgccttatccagtacaagcaggctatgctcccccccttcccccaaaatgccgcccatccagagcagtcgttgcgcctgttgacgcgcatactgcgatgcgcttttccaggcaaccagatgcagcaacgtttgtaacagcaggatccgagacgcgtgaccatcgcgttgtaatcgcctgaatacgggtaatgcaatactacgtaccgtcgagaaaccgctcgccgcctccccctcaatcggcgataaaccaacagccgcctgtttgacgaaatcgcataactgattgtgtgttaatggccgctcgcctgcgctcatataccctgcggcaaaacagagtaacccgataccctgagcccaatcggtcgatggcagaatcccctgcggaacattcggtgccgacgtctgtgcggcacaaagcccctcgtcgtaacactgtgcaaaacgttgctcatatattgctgagttgacgccagaccacggcagcaaatgcagtgctggctcaagctcagttatctgattcaccgtctcaacaacataacgcaagatggtttctctggatggcatggatgtaccttgccgaaacgcaaccatttcactcattactgtgtcctcattttgcgggagcagaatcactgctcccgattagattggattacattgccagcacgtacttcagcatcacgcccgcggcaatggccgaaccgataacccccgccacgttcgggcccatcgcgtgcatcagcaggaagttctgcgggtccgactccaggcccaccttgttcgatacgcgtgccgccatcggcaccgccgacacccccgccgaaccgataagcgggttgattttgttcttactgcacaggttcatcagcttcgccatcagcaccccggccgccgtcccaatcccgaacgcaatcacacccagcagcagaatgcccagcgtctgcggctgcaaaaacttatccgccaccagcttcgcgcccaccgacagcccgaggaagatggtcacgatattaatcagcccgttctgtaccgtgtcgctcagacgctccaccacgccgctttcacgcatcaggttgccaaagcagaacatccccagcagcggcgcggcgtccggcagcagcagggccaccagtagtaacagcaccaccgggaagaggattttttcccgcttactcaccgtgcgcagctgcaccatgcggattttgcgctctttctcgctggtcagcgcgcgcataatcggcggctggattaacggcaccagcgccatatacgagtacgccgccaccgcgatggcccccagcagctccggggccagcttgcccgacagataaatcgccgtcgggccgtccgcgccgccgataatgccgattgccgccgcctgcggcagggtgaaggaaatcaggccgaagtagttcagcgtcagcgcccccagcacggtggcgaagatgccgaactgcgccgccgcccccagcagcagggtgcgcgggttggccagcagcgggccgaagtcggtcatcgcgcccacgcccataaagatgaccagcggcgcgacaccggagccaatcgccactttatagaacagcgccagcacccccggcgtgtagcccatgtccaccgccaggttctccatctggctctgcaccgacggcagcgccagcgctaatgcctctttaatggcgtgcacgtccggcgcgcagttgagcttcgcggcaatcaccgccagttgcccggcgtcgtggtgcgccagcaggctctccagcgcggtcagcgccatacccgcttccgggatattggagagcaggccgccgaagccaatcggcagcagcagtaacggttcgaacttcttcgcaatcgccagccacagcagcagcaggctgaccagcagcatgatggcctggcctgcgccaaggtgcatcagccccatgccctgaagcagggcgttcagactttccatttcagttctccgttacgccagcgtcatcagggtgtcgcccacggagaccgcgtccccggacttcaccgcgataccgcgtaccgtcccggcctgcgcggcgcggatttcggtttccatcttcatggcttccagaatcagcagcacgtcgccttcggccacgctctggccctcggtggcaatcaccttccagatgttgcccgccagcggcgcggtgaccggggtgccggcgcctgccggggcaaccggggatgccgcctgaaccggcgcagacgaagccgccgtcagctggctgatatcgccgccgtcgctgaccttcaccacaaaggctttgccttccacttccacggtgtagataccggaggcggcaggcttctctgcttttgccaccggctgcgcggcttccgcctgcggtaccggctcaaacgccgccgggttgtggcggttttcgaggaatttgaggccaatctgcgggaacagcgccacggtgagcacgtcgtcgatggcgtttcccgcaagctgaatgcccttctcctgcgcctggcgcctgacgtccgcttccagttcagccagttccggcttcagcaggtccgccgggcggcaggtcaccggagcgcccccttccagcacgcgggcctgtaacgcggcgttcaccggcaccggggtgtggccgtattcgcctttcagaatgcccgccgtttctttggcaatggttttgtagcgctcgccggtcaggacattgagcaccgcctgggtgccgacaatctgcgaggtcggggtcaccagcgggataaagccgaggtcctcgcgcacgcgggggatttccgccagcacctggtcgagtttgtccgccgcgttctgctgcttcagctggctttcgaggttggcgagcattccgcccggcacctgcgccaccagaatacggctgtcgtagcccttcagctggccttcaaaggcgtgatactttttgcgcacctcgcggaagtacgcggcgatattttccagcttcaggatatccagcccggtgtcgtgctcagtacctgccaacgtcgccaccagcgcttcggtggccgggtggccgtaggtggcgctcatggaggaaatcgccgtgtccacgccgtcgacgcccgcctcgatggccttcagcagcgccatctccgccatcccggtggtggcatggcagtgcaggtgcaggcgcacgtcatagcgttttttgatttcgctcaccagctcatacgccgccatcggcgtgagaatgccggacatatccttgatggcgatggaatcgacgccggtctctaacaactgttcggttaaatccagccaggtctgcagggtgtgcgccgggctggtggtatagctcagcgtgccctgggcgtgcgcgccgtggctgcgcaccgcctgcagggcggccttcatattgcgcgggtcgttcatggcatcgaagacgcggaacacgtccatgccgtttttcaccgcccgctcaacgaagcgttccaccacatcatcggcgtaatggcggtagccgagcaggttctggccgcgcagcagcatctgcaggggagtcttcggcatggcctttttaagctcgcgcaggcgcagccacgggtcttcgccgagaaagcggatacaggcgtcaaaggtggcgccgccccagcactccagcgagccgtagcccacgtcatcgagcgcggcggcaatcggcagcatgtcatcaaggcgcaggcgggtggcgaacagggactggtgggcgtcacgcaggacgacgtcggtaatggcaatggtcatggatccctccgggaattaagcgttaaggcggtgatggtgaatggcggcggcaatcaccggctttaagcgggtgaagtcgtccacgacgggaacggcgcgcggtgcgggcgcggcgactggttccgggaagaagcgagtaatcacggcagacatgccgcggatggcgaaaatcagcaggaacagaaacgccagcacgaaccccatgccgaggaacatcagggtgaagccttcacctaatagcagagctgcattagtcataaaatagccttcaggcaggaggcacgataatggggctatttatgacgatgaaataataagagtggatttccctgagccgcccccggccagagcccttggttattattatcgtcataacgtattaccaccattatcgtgcaatttacgtaatcaggtttatttgatgaaacttacgttctggcatatttcatcagcgacgatctctttacgctgattaaaaataattttgttctgttcaaacagattattcccatgggtatcaatagaaacaatcagcgggccaaactctttaacccgacagagccacagagtttccggcatccccagatcgcgccattgggcatcttcaatttcttccacgcacacggcggctacaaccgcacaaccggcagggaatacgcagtgcagcgctttgtgttcagcacagccctcttcggtacctttacccataccgcctttacccacaattaatttcacgccggtctgcgcaataaattctttttcgaatttctccatacgcatgctggtggttggtccaacggagaccatttcaaacttatcgtcttcgcctttaattgggcggacaatggggccagcgtgtaaaatagcgccgccgcgaacatctaccggaagctcgcgaccaccttcaattaaacggcgatgggctacgtcacggcaggtaacaatatgaccattgagataaataatatcgccagccttaatatccgctaaatcttcatctttaattggcgtagtcaggatttttttagtcatcagaaattcactccgctgtgagacgtaatggtgtaattcaaatctttatcgaaaacgatatgccctttacggtgcgaccagcagccgacgtttaccgccacgccgatggtagaaggatgacgcgcggtgttttcaatgttcacgcccataacggaggtattaccggacatcccctgcggccccaggccaattttgttaatgccttcttccagcattttttccagcgaggctgcacgctcattctcgttatgcgaaccgatcggacgcatcagcgcttttttcgatagcagtgccgccgtttcaacagaggtcgctacgcccacgccaaccagcagcggcggacacgcgttgaggccgtagctggtcatcacatccagtacaaagcgggtcacaccttcatagcctgcacccggcatcagcaccatcgctttccccggcagggaacaaccgccgcccgccatataggtataaatgctgcactgatcggaattgggaacgatctcccagaagaccgtcggcgtacctttacccacgtttttaccggtgttgtattcatcaaaagtttctacgctgttgtggcgcagcggagaatcgacagttgctttgatcaccgcctcacgcaacaacgcttccagctcgccaatcagcggaaagttcgtcccgcactccaccagaaactgaatgacaccggtgtcctggcaggaaggtcgatccagctctttcgccagacgctggttctcaatcatggtagtaaagatgacgtcggccagtttactggtctctttcttatgcaaatcttccagttttgcagtgacatcatcaggcaaaactttgccggtatatcccacaaacttggccataacgtcggtcatatgggatatctgttcacttttgctcataaatgctccttagtcagaacagcttccgttaattacggatgaaaagggaaaaggattggcagcaggatcaagctgacaatggttgaaacgataatcagggggataccggccttagcgtagtcgacaaatttatagccacccgcggagagcaccatcatgttggcaggcataccgataggggttgcgtaggcgcaggaaccgccaatgaccgtcgccatcagaaccgcacgcgggtcggcccccatacctgcggcaatggacaaactcaccggcaccaatagcgctgtcgttgcggtattggacataaagttggtcatcacaacggataaggcgaaaacggcgatcagcaacatgaacggtgaagagttttgccccagcatgccgattacatagtccgcaaccagcttgcctgccccggtcatttccagcgcttttgccagcgccagggtgccgccaaagataaaaatagtctgtgaatcaatggctttataggcctgtttttccgtgagtacgccggtaactaccagcacaagagcgccaatacaaccggtcacggccaggctgacaccgatcttcttctcaaagatcatgccgaggatcgttgcgatcaacaccaccagtgagagccgttgtttccactgtggaacatggctgtagtcacgttgctccccgacgctccccacctcaccgccggtcgcattattcggcagaaagcgatagccaatagtcaggaagtagagaatgccgcagatgagcatcgggagaccgatttttgcgtattcaaaaaagccaaagccgccgccaatattctgtagcgcagactgcgcgataagatttcccggcgcgccaattaacgacaggttaccgcccaacgcagcggcgaaaaccagcggcatcagtagacgagaacgcgagaagcccgattttgccgccacgccgatcaccaccggaatcaaaaccgcagcggtaccggtgttagagaggacgccagacatcaaacccaccaccaccataatggtgaagatcagctgtttttctgttttcgcgaagcgcgtgatgacgccgcccactttgtttgccataccggtctcgaacaacgcaccgcccacgatgaacatcgcgacaaagaggataacgttagtgtcgataaagccagcaaaggcctgtttgatattcagaacgccggtgatcactaaggccacgcagacaatcatggaagtgacggcaagtggcactttttcccatacaaacatgacgatagcgaacaccaataaacataaggtaagggtaatgggttccatatttataattatccaatcaatgatatatgatattgtatccaatgttgacagggagaaattattcccatacaaaaactaagtcaaatcgtttctcaggaaagatgcaggagtgggatctacatcaagatcgtggttagatcgttactggacgtgattaatagaattgaagaattggttgaagcgcctgcgatgctcacgcaggcgaaaagatcaggcagaagggtcaccaacatagcgggtcagcatattctccattgagcgaataatgtgttcgcgcatgcgctggcgtgccaatgtttcatcatgaagttcaagagcttgcagaatacttttatgttcctgaatggaaatcacggcatactcttcttcggtgaccttatggcccatcgacaggccgttccacatattacagagcaacattttcattttttcgttgccagcaacattccatatttccatatgaaatgcctgattcaggtcggagtattccgccgagttattttccgcgagagccttttcagcggcataatgcacctgggctatccgcgagatatcggtgccaggacgagaagctttagccaccgcctcactttctaacagcgcgcgaatttcatagtgttcacggatcgtttgttcattgatgcccaacaccaccgcccctttattagggcgcacttttatcagcccatccgccgccagaatctgaaacgcctcgcgcactggcatactggacacgccgaccattctggcaatgccttctaacgtaatctcctgcccttctactaactccctcgaaagaatcgctttacgcagcactgccgcgacctgttctttcgctgaaagaagcttaatcttccctaacttaggcttctgcactttcccaatccttcatatgttgacgcattatttctgctaaagagaggaaataacgctgcataacttgcccaatctcatcacgccgcccctggcgtatgacgtcagccagttcagcgaaaagctgcgccgactcctgattatcttttttcagatgcaaaataacataagagacataaccgtccaggaactgctgatacaccttttccagatagcggttattcacataagaaatcagcatcgcatgacactccagttcgcaggatttgtcttctgcgacagccagcgcttgcgcacgtatcaggagggcatcgcctacttcgctgggtatcagcgaaaacatttcggcggccatcgcggcaattacgcgaaaaatatgactcacgcgatcggcctcaagatgcgcgacctgcatgtgcctgttgggcagtcggattaaaaaaccttcctgttcgagtgactgtagcgcttctcgaaccggcattcgtgaaagaccaagctgctccgcaatactttcctgcgcgagttcttctcccgcttttatattgccggaaagaatttcatagcgaagcatttgcgtaatgtgatcgcgggtttgcgttctttggatctttttcacgacgttctcgttaataaccgataagacgtgaggagtttagcagatttagtacttgatttcgtggcttgtttacagtcaaagaagccggagcaaaagccccggcatcgggcaggaacagcttatttattaataaaatcttcacccaactgaatatcttttttcagcgtatccagcatagcgtccagcgaatgttgctcgaaagcgctcagtgtgccgatggatttacgctcttctacaccgtttttacccagcagcagcggctgagagaagaaacgggcatactgaccgtcgccttccacataggcgcattccaccacgcctttttcgccctgcagagcgcgaaccagagaaagaccgaaacgcgcggcagcctggcccatagagagggttgccgatccgccgccggctttcgcctcgacgacttcagtaccggcgttctgaatacgtttagtcagctcggccgcttcttgttcggtaaaacttacgcctggaatctgcgacagcagcggcagaatcgtcacgccggagtgtccgccaatcaccggaacttcaacttccgttggcagcttacctttcagctctgcgacaaaggtattagagcggatgatatccagcgtggtaacgccaaacagtttgtttttgtcgtatacgcctgcttttttcagcacttccgccgcaatcgcaacggtggtgttcaccgggttggtgataatgcccacgcacgctttcgggcaggttttagcgatctgctgcaccaggtttttcacgatgccagcgttaacgttaaacaggtcggaacggtccatacccggcttacgcgccacacccgcagaaatcagtactacgtcagcgccttcaagcgccggggttgcgtcttcaccggagaaacctttgatttttacagcggtggggatgtggctcaaatcaacggccacaccgggagtcactggagcgatgtcgtacagggagagttctgaacctgaaggcagttggttttttaaaagtaatgccagcgcctgaccgataccaccagcagcgccgaggactgcgactttcatcctaaactccttattatatgattagctaagtgtctattgctccgcggcggcgaccttaattcacaaattcaatgattacaatcctcactcatcaagaatgcggagtcgcgcaattttggcttttatgcatttaatttgcgtaatccggatcgactgcaaccagagagcaacgttcctacaggtggtgacaatataccctactatcctctcaaaacaacatcattttgataacaattaatttacttttaatcttatttgcgaggcgtgacacaggcatgtttcttgataacgaaatttgataaaattccgctctttcataacattatttcagccttaaacaaggcagactgtttgcataaaaattcatctgtatgcacaataatgttgtttctaccgccatattacgggtgacttatgcgaagctcggctaaacaagaagaactagtaagagcgtttaaagcgctcctcaaagaagaaaaattcagctcacagggcgaaatcgtcctcgcgttgcaggatcagggctttgaaaatatcaatcagtccaaggtctcgcgcatgttgactaagttcggcgcagtgcgtacacgtaacgcaaaaatggaaatggtgtactgtcttccggctgaactgggcgtcccaacaacatccagtccgttgaaaaatctggtgctggatatcgactataacgacgctgtcgtggtgattcataccagccccggcgcggcacaactcatcgcgcgcctgctggattcactggggaaagcagaaggtattctcggcacgattgccggcgacgatactatcttcactacgcctgccagcggcttttccgtaagagatctgtacgaagccattctggaactttttgaacaagagctttagtcccacttcctccgtcgtcgtacggcggaggcacctttttgtcctctcccctcgccgctttcctgtacggctatcatttggcaaatcatgcccttaaacattcaccgcatgaatgacaaatcaaaaaaacgcacaaaatgtcaaattttttaacctattgattttcttttattttttaaacagcagcggcgaaaaacagcaattttaattccataacgttataaaaaataaaatttttaatgtctttaaaaagcagaaacaattagcgtggtattaattaatcgcgtgattagtgtatacttaattttgtgatgagggtcacgaaacaaagaccccagtaaaggaattcgacgaggtaaaaatcatgaaaatcaaaaccactgttgcaacattaagtgttctgtccgttctctcttttggcgctttcgccgcagaacctatcagcgcagagcaagcgcaaaatcgtgaagcaatcggatcggtttcagtcagcgctatcggctcatcgcctatggatatgaacgccatgctgagcaaaaaagcggatgaacaaggcgctacggcctaccacattaccgaagcgcgtagcggtagcaactggcacgccactgccgaactgtacaaataaaattcacctgccatcgcatataacgtgtcattgcttcgcggagatatcgcataagaaaagcccattaatccgcgaggttgaccctataaaggaataaaagaccatgaaaacgaaatacattatcgcatcactcggcctggccactctgctctctttcggcgcaaatgccgcagtacatcaggttaacgcggaacaggcgcagaatctgcaaccgatgggcaccatttccgtctcgcagattggcagtacgccaatggatatgcgccaggagattgtcgctaaagccgaaaaagcaggcgctaatagctatcgcatcatcgaattaaaagaaggtgataactggcacgccaccgccgagttgtataagtaaaccctcgtcgtctaacccgacgacttgcccccgcctgtcgggggcttttttatgctttttcaatgccggacattaaaccgtagccgcccctccagctcttcttccgcttcatcaaagagtaaaatcagcgccccgtagcgcctgcgcagtttatcaggcaggtgaacgaactcaatctctagcggtagaggtaagatatcgctcattaccgcatcccataatgtatcaagatcgcttactttctcactggcaagaccaaacgtctgcgtaaactcgcgataaaaatcgctttggtttttaatatcattaaaatcaaaagtatagacattcatagccagccaccatccccgacagacaattgtctgttttactactaagcatcattatgcagaggtttcacttccagaaacgcttttagccccggagcactcttgcgctgtttttgtatctcaaataagtatagtcataaaaaaaccgacgcttttggcatcggttcttgtgggttagctatcggtaagcgcgttctggtatttatgtaacatgcccgtcaggcgtttaaccggttccgtcacctgcgtcggcgcctcccagatacgtaatttctcctgatagatatccagctcatccagcaactgaccaaagtagcgtcgccgtttatcatcgcttccggcggaaataacatggtctgcggtacgacgaagctgacggtggaacactgacagatcctcattaaccggtatcggcgcgtcgcgcagacgttgatgagcaatgatcatcgttagcgccaggcgaaacttcggcaaatcgccagggaatttattcatcagcaaaaagagttgctgatataacgcaggcagacggttttctttacgacgtaccacgttggtcgtcattgccgagaccgcagcggaaacaaactgattaagcagcacgcgaccggttcgatctttggatttatcacgcaccagcaggatgacgataaacgccagcatacagccgacaatttgccccaacgcgctgtcgaggaactggctgaaatggaacgtcatcggattatccaacacaataatgttaatcgtactggccagcgcccccatcgaccccagacgccgtttctggacctcaatgccgataaagaaccccaataccgccaggctcaaacataacaacagcatactttgctgcgtattgggaataatcaccaggaaatagagcaatcccagcggcaacgccgccagagtgccataaataaaatcaatgcagaccatgcgcggattgggtaaacgcatcgccagcgaggtcaccacggcaatcatcaccatcgcgccattacccgatgtccagccggtccatagccagaataatgtccccagtatgcaggaaagcgtggtgcgccagaagttcaccatcgcatggtgacgttcagcggattccactttaactacgggctcgccttgcaggatctcttcttccgtcgcgctgattttggtgttgctgatcacgccgcgtttaagcagcagatagcgcgtcgctgcgcctacccagctataaagcgtgacgggcgtttcgcgctcgccggtccagacaatgacacgccgcatccgttttaactgcctgtgaacgtcctgtaccgtttcaaccggcgtctcgaacagttcccggaatgtatcggtaatcagttccggccgcgtgttttgaataagataagtttcacaggattgcgtaatcagcgtgagcgaaagcgtattcaacgctttcaggcggcggttagcgcgtacccagcgcgaagattccatattcagattacttcgcattccctccagcgccgccgtgcgtcgcaccagatcgccccaggcgttgtcgacttcttcgctgtcgccatgcttaatacaaagttgcattagctgatattgcgctaccagtaaactgtccagttcgcgatcaacctcctgctttatcgatcgcggcgagaaaagcagatccgctaaaatagcgcagccaatgccgatgacgatttcgctacagcgctcaagcgcaaattgcggcgtaagcagcggctccgtctgaatggtaatcacaatgatcagcgcagtataacctgacagtccccacgcataagagttttcgatccgtactaaagaggagatccaggtacaaaaaccggcccagacacagcacaccagaatcatcaataacggcgcgcggatcatagagataataatgataagcgcggcgatacagccaataaacgtcccgataatacgcaacattccgcgataacggatagcgccggaatagggttccccgccggcggcaaatgccgggcctgccgccacgatcgcggcggtcagcaccgcccaacgcggcgtctccagttgaaaatggaagccgataaataatgccagcacaatggcgcacgccagctttaccgcaaaacgaatgtgctggttggcaatggagaaaatgcccatgacgattaaccgaattcgcgcagccggtgcgccagtttacggaagaaggagtcctggcttgcgtcacgatcctgcttaccggtgatcacgacggttgccgtcgtaccggcaggccacaaattcccctgctgctcgtcgagtcggatacgcaccgggacacgctgggccagacgcacccattcgaggttagagtctatcgtcgccatccctttcgcatcgctggtactgctggcattcgttacccctgccgccacgctatcgacggtaccttttaatacccggttgctgccaagcggcgtgatttcggcacgatatcccggacgcacgccttccagcttggtctcttccatataggcctgcacgtaaaaagagttctttttcaccagggcgacggctgtggaaccgcgggtaataaattcaccggcataaacattaaggttagtcacccagccgtcggcaggcgcgcgaatgacggtgcgttccagatcgagtttagccagatcgcgcgtcgcctgggctttagccagttgatgcagtaccgtctgcaagacgttgttcgcctgatcgatctcttcccgggacatcgcctgtacgccgaggcgattacggcgaccggcttcctggcgtttttcctgcgccagtacctgataataggctacatcagcttccgcttccgccagcgctttttgatagcgtggctgatcgatggtaaacaggacctgatcctttttcaccagttggttatcatgcacgtttacatgggtaatcaggcccgcgacatccggggcaatagcgacgacatcggcgctaaaacgcgcgtcgcgcgtccagggagattcggtgtaatacacccaggcgcggaaaatggcgataaaggccagaataaccagtacgagggtaatggccgtacgggagagttttcttgttagtgttttcacttcaacctcaaacgaacaggcgcgatattaaataaaacagacaacaatacagcgcggtattgaacaaagccggatgccagacaaaatcatagatacccgtcggcacaagcatccgacgcaccagccaaaaaatagccagtgacaaaagcaattcgaaaaatatcggtgggaaggaaagaccaaacaccacgataacgggaaacagactcatgttgaccttgatttctgagagagagcaggcgatagattgttaagctacatcgccgcagagaagggcaagagacgccaggcgagagcgacatagctcttattcgaataatagtatattaacgtaattgttatgctgttatctatattatgtgatctaaatcacttttaagccagagtgaataatggaacgattaaaacgaatgtcggtattcgccaaagttgtcgagtttggctcttttaccgccgcagccagacagctgcaaatgagcgtatcgtccatcagccagactgtggcgaaactggaagatgagcttcaggttaaattgctcaaccgcagcacacgcagcattgggctcaccgaggctggaaaaatctattatcagggctgtcgtcgtatgctgcatgaagtgcaggatgttcatgagcagctttacgcttttaataacacgcccatcggtacattgcgtatcggctgttcttcaaccatggcgcaaaatgtgctggccgggcttaccgcaaaattattaaaagagtatcccggtctggcggtcaatcttgtgacaggaattccggctccggatttaattgccgacggactggacgtggtgatccgcgtgggcgcgctgcaagactccagcctgttttcccgtcgactcggcgcgatgccgatggttgtgtgcgccgccaagccctacctcgctcagtacggcgtcccggaaaaacccgccgatctcagtagccattcctggctggaatatagcgtgcgcccggataatgagtttgaacttatcgcgccggaaggaatttctacccgactgattccacaggggcggttcgtcactaacgatccgatgacgctggtacgctggctgaccgccggaaccggaatcgcctatgtgccgctgatgtgggtgatcgatgagatcaatcgtggcgatctggagatcctgctgcctcgctatcagtccgatccccgtccggtgtacgcgctgtacaccgaaaaagataagctgccgcttaaagtgcaggtagtgattaacgcgttaactgactattttgtcgatgtcgcacacctgtttcaggggatgcacgggcggggaaaagaaaaataaaaacaccgggtaattgctgaagacgattgtaggccagatgccacccgaggctgacatttcctgatggcgctgcgcttatcaggcctgggcggcacacaccacaggcctgataaggcgggcagttatgcggtgccgccaaccgtcaggttatcgactttcagcgtcggctggcctacgcctaccggcaggctttggccctctttaccgcagacccccaccccgttatccagcttaaggtcgttgccgaccatggagatctgttgcatcgtttcaatgcctgatccaatcaacgtcgcgcccttcaccggcgtcgtgactttgccattttcaatcagatacgcttccgaggtagagaacacaaacttgccggaggtgatatccacctgaccaccgccaaagttaggcgcatagatgccgtactcaacggattcgataatttcctgcggcgttgactgccccgccaacatataggtattcgtcatacgcggcatcggcagatgcgcgtaagattcgcgacgcccgttaccggtcggcgcagcgcccatcaggcgagcgttcagcttgtcctgcatgtatcctttcagcacgccattttcaatcaatacgttgtactggcctggcgtaccttcatcatcgatagcaacggagccgcgacggttcatcattgtgccgtcgtccactacggtgcaaagcgcggaggcaacctgctcgccgatctgaccgctaaacacagatgtcccacgacggttaaaatcaccttccagcccgtgaccgaccgcttcgtgcagcaatacgcccggccacccggcgcccagaaccaccggtaacgtccccgctggcgcagcgaccgcggagagattaaccagcgccatgcgtaccgcttctttcgcccacgcgtcggcgcgaacctcgccgtcgagatcggcaagaaaatactcataaccaaagcgaccgccgccgccgctggcgccgcgctcgcgtttaccgtcttcttccacctgcacgctaacggacaaccgcaccagtggacggacatccgccgccagcgtcccgtcggtcgccgccacgaggattaattcatatacgccggtcaggctggcgttaacttcctgcacgcgtttatcggcttctcgcgccactttgtcaacgcgtctgaggatatccagcttctcttcgcggctcatactttgcagcggatcaagggtggtgtagagcggctgatgcgctacggcggcgagcgtttttaccttgccttcgccgttctcgcgtacaatggttcgcgctgcctgcgcactctgctccagcgccaggaggcttatctggtcagcataagcaaaaccggttttttcgccgctaatggcgcgaacgccaacgccctggtcgatattatatgaaccatctttaatgatgcggtcttctaaaacccaggattcgtgatagctcgactgaaaatagaggtcgccataatcaagacggcgttcggccagttggcccaaaatagcgaacagatcctgatggttcaggccattcgccgctagcaattgttcacttaccaggttcagactcatcgtttttgctactcgttgatttctgccggatggcggttcacgccttatccggactacgttgttagattgtacaaaccggataaacgcagcgccgtccggcatgactatttactgagagtggggcaattcctcgcccccgtcaaatcattgctggctttcttttatcggttggcgcagaacttcgttgatctgcggcgcatcgaccggaccggtaatgcgatatcgcaaaatggagaccttgctccatagcggccccaacactttactggcggcaaataccgccgcgccgacaatcgggttaacggcaaacgcggcggcgacgcccactgtggcggaaatttccggcgcgacaacggcctccatatcaagacgacgacgcaccagatcaacagaacctttcattgcaatatccgcttccagcccatccaccagcgtatcgtcagtatgcaggacgccatctttaatccacgcggtactatgaatagagtcgaaatagaagccctcgctaaaggtatctctgaagtcaaaccgcagcttacgcagcaacgcatcaaaactgagcagccgcagtaactgtccggcatgaccgctactgagatcagtaaactcgcctttacccagacgcgtacgtaaaatcccgttgagcgtggcttcctcaggttgccagggcgggtttcgccagtgcagatcgtaatctacgttaaaagacgcgttctggattggcgtcgagataccgaagaacccggcagccgtgtcgaggttactaccatgcagactacctttcagcgaggttcgttcattacccggcgcattcacccactcgccgttcgctttcaaacgggcgaatccggtatcgatcaggccattcgccagagtcagcgtattgcctttgatggcgaaatcgccatcaatacgcccatatttttgcccccacagccagcactcttcgcagcgaagctgtaagtccggccagccgcggaagctaatcgtgttcgccgaagccaacggcgatgtcggcgttggtgacgaggcgtgcgtttttgcgacgccagggttgtagtacaggtacttaatattcgccagccacggcgcatggttgcgcatgagcagcgtggcgttcacctcacggccctgcgcttcaatttttgttccgttcagcgagggggctgaaacgacgctcaaattgttccactgctggccacccagcgatagcgcgggagtacgcaacgtgacgcgttgaggaaactcggctgaactgctcacgttatccgccgcgcctttctggaataacgccagccattgtgcgccatccagcgccggcagattgagttcaacgccttgttgagcaggtaatggcggaatcgtccggctgtccgtcgtccagatagcccgatccaacgtcagcttctgatttaataaccagcggctgttaaagtgatttttactccctgcgctccccgttagcgcaaaacttttcaggttgccgtcagcctgaatgttcaccggaatggcttcgcctgcgggtttatttagcggagaaggtaagtgactgctcacatttctcagatcgccgttcagctcgatgtgataagtggtgtcagcgtgatacggaagatcgatgccgactttaccattccacgtcacgctgccgctcagggcgtcattcagttgcggcggtaagacgcccatacgcgttggttgccagttaccgttcaggttgacggcgacctgataggcttttgccccttccgtcgtactgaaatccaggttaagcggctgattaaaccagtttgccgtcagcggcccgctttttagcgcgccattcacaaagctgaatttaccgttcagatttttgagcgtgctgtttagcggcttaataaacagactgttattacgcaacgagacatcgccctcggcggtaacctgttctccgtccagcggaatatcaagatgtaagcgagcattcacatcgccatctaactggagctccgccagcgtcgagccaagcgagtcttttagcggcgtctcgtcaaaataaggcccaacggcttttcccggcccgttaatatcggcatcaatgagcagtttctctttggaataatccggaatcgtcgccgcgagtttgctggccttcaccccgcccaaatcgacgctatccgaacgcatccacagaccgtcgttcaggaaatccagttcaatgttgagattttttagcgccggccagtcgggttgaaaggcaaacgtcgcattgcgtagcggcaccagcacttcaaactgaccttcgttatgcttatagggaaagaggtgcgggttaccaccgtaaaccaacgtggcgttatccgcctcgccgccctgaatcgcgccgctaaggtaatcgaccagcgctttgcccatcaggttttccggaaaatagcgccacgcctgagatccatcatcggtactgattccggccagaatacccagccacggttcgtcgcccgtcggttgcagatagcggaacccgccgcgcgcatgtaccgcctttgctttgacgtcaatgtcgcggccatcaagctgaaagccgttctcattcttcaaccagctaagcgtcgcgacgccgttttcaatttccagcggcgcgcgaaaaacggtttcatagggcattttagcttgctgcatcgcaaccttcatctgcccgtcttctacgcttcccgccagcgtaccggaaaaatgttccgcgccgggcaacagcttccactgtttccaggcaagattttcccacgatgcctgaaaacgcgttttttcggtcgcctgtagcggaatatccagcgccagtgtggcgatctttccgctcggctgcgtagcctgccatatttcgcccagcacaggcgacagtttagccgccagcggacgtaatgcttccagccccgccagttcaagattactggcgcgaatgcgtagctcatcgctacgtgtgtgattctcgccgccgacgtcctgctgcgggagccaggccacggttaaggctccgctcggccagggtttaccatcaagcgtaatccgtgtgtccggaatataaaactgccagcccggctgctcgcggctaatctgcgccgtcaggttatcgacagacagcgtgtgcgtcgtgttatcgcccagccagcttgcgccgccctgtttcagccagacgtctcctccggcgatttcgcctttactgagcgtcatccagccttccagactgaaacgcgccgtctggagcgccacattatcctgcatccatttgcccagccacggcttgacgtcaatatcgtcggcctgtaaccagactctgccgttattcagcaaaccgtcgtcatcgcgtaaatccatccgcacctgcatcacgccgtgctgcccggtcaggctggagaggctgacctcgccttcggcgcggtgccgctctttgccgtttagccaggtaagctgtgggatcgccagctccgcgcgttgtccggaaagcgtcagaaaactgatttggctatcgcgcagatcgaaatgatcgaactgacgcaggaaaagatcgcttaaacggctggtttcgatgcctttgccgtcgctgctttgaagaggcgtgttggtgcggaaattgagttgccagaaggtcaggtcgcgaaactgccagcgcatatgcaacaggctttgccagacgtccagcgccagcgtaacgcgttttatcgacagctcgccgccatctttcagggcggcatgaatattatgcgcttccagcgtagggccaaaattttgccagcttgcggagagttggctggcggccaccggcacgccggtcacggactcaattttattcaggatagctggacgccaggcgtcaagatgaggcaacgccaggcgcagcccgctaaccagcagcgctgcaatgacgatgagcgcggctccagtgagcaataaaatccccggcaatcgcctcacgcgtctctccttgtctgccaaaaaatacgactcacacccgttgagggtatattgccggatggcggcgcttgcgccttatccggcctacatgcgctggtgctactactcaattacatcattacgacgtcaaactgctcctggttataaagcggttcgacctgaactttaacctgtttgccgacaaagatttcgacttccgccagcgcgtgtgattcttcgcctttcagcgcttccgccaccgcaggagaagcataaaccaggaagcgatcggagtcataagcgtgatgaacacgtacaatttcacgcatgatctcataacagacggtttccaccgtttttaccgtcccgcggccatgacaggttggacactcgttacaaagcacatgttccacgctttcacgggtccgtttacgggtcatttccaccagccccagcggcgaaaaaccgttaatactggttttcacgcgatccttacttaacgcctgttccagcgaatgcagcacccggcggcgatgatcttcattattcatgtcgataaaatcgataatgataatgccgcccagattacgcaggcgtagctggcgggcaatggcctgagtcgcttcaatattggtattaaaaatggtgtcgtcgagattacggtgtccgacaaacgcgccggtattgatatctaccgtcgtcatcgcttcggtttggtcgataatcagataaccgccagacttgagttcaaccttacgctccagcgcgcgctggatctcattttccacgtcataaagatcgaagatcggctgatggccactgtaatgctccagcttactggtcatttccgggatgtattctgcggtaaactccagcagcgactcataggtcagacgtgagtcgacgcgaattcggtccaactgcgcatcggcgaaatcgcgcagcacgcgctgcgccagcgccagttcgccatacatctggtagcgcgtttgcggacgctttttgcgctccatgactttcgtccagacgcgcttgagataggcggcgtcagacgcgagatcctcttcacacacgccttccgccgcggtgcggataataaacccgccctgttcgtcgcagtattccgccaccacctttttcaggcgctcgcgttcactttcgctttcgatacgctgggaaacgccaacgtgtgacgcgccgggcataaaaacaaggtaacgggagggcaacgtgatgtccgtggtcaaacgcgcgcctttcgtgccgagcggatctttcactacctgcaccatcagatcctgtccctgacgcaccagttcggagatatcgcgcacggtaaactgtttttgctcgtcgcccgccacgcattcggtatgcggcataatgtcggaagcgtgaagaaatgcggctttatccagcccaatatctacaaaagccgcctgcatacctggaagtacacgacttacacgacctttgtagatattgcctacgattccgcgtcgcgcttcgcgctcaatatggatttcctgaagaataccgccatcaatgtacgccacgcgcgtttccgatggcgttacgtttaccaacaattcagccgtcatgtttatcccttttatcacgcagtgcgttaaaatgactcaacaactcatacgtttcaaccagcggtaagccgaccacggcgtgatagctgccatttatcttcctgacaaaacagccaccccgcccctgaataccgtatgcacctgctttatctaaaggctcgccgctggcgacatagccagtaatatcctgcgcagaaagcgtgcggaaagtcacctccgttaccaccacacaatccagcgtctgctgcgagtccgcaagcgcaacagcagtcatcacctgatgcgtatttccggaaagcaaacgcagcatttctgcggcatgagcggcgtcgcacggcttttccagcacctcgccgtttaacacgactatcgtatccgcgcccaacaccggcagatcacggggaaccagcgccacgccagcctgcgccttttcgcgtgccagccgaacaacatactgctgcgcgctttcctgagcacgccgttgctcttcaataccaggcacgacctgctcgaatgaaaatccaagttgagtcaataattcctggcgacgcggggaaccggaagcaagatacagagttgtcatatcgacctttattgcacagcaaactgctggcgtactttacgcatcagcaaaaagagccagggccacagcacgccattgactacactactccagaacacttccggtctgaaagagacgttgatcactaaaaactcggcccagaaaacaataatgtccacggccagtgaaagcaacattaccaccagcgcctgctgccagagcgccaggttacggaagagctggaatttcagagcgaccagataggcgacaatactcatcgacagagcgcgcacgccaagtgtggaaccgctgatgagatcaagtatggcacccatcacaaatcccgtccccacatttacgcggtgcggcagggccagaatccagtacagtaagatgagcaaaacccagtttggccggaaaacaatgatgtcgtccggccagggcatgatttgcagcaacagcgcaataagaaacgagagccagataacccagcgcccctggctacgatagctcgccaccattaccctcccggcgcacgcgcaggcggcgtggtcgcgcccgaaggcgatggttgcgttgataccggcgccgtctggcccgcagatggctgagtaatccccgtcgccgggtccggcactggcgccggcggccccatcgcatccggagaaggcaacacctgcggcatcatctgcatcaggcgctcattggcgacgcggtgaacctcttccggcgtcatcggattggcgccgttacgatcggctccccacaacagcagcagatagcgtaaacgctgcaaacccgcggttggacgtgcctgaatgacggtataggcgcgctgagtgtccagcttgacggaggagaccaccgccaccggatacccttccgggaaacgcccaccaagtccggacgttaccagcacatcgccaacgcgaatatcggtattggcgggcagatgttcaagctgaagatcgtcagtgcagccgttaccggcggcaatcacgcggatgtcattgcgcagtacctgaatcggcagcgcatgagtcgcatcgcaaatcagcagtacgcgactggtcagtttcgccacggcgacaacctgccctacgacgcctttgtcgctaatgaccggttgaccttcatatacgccattaacgctgcctttatcgataacgacctgatcgctgtaaggatcgttaaccgttgaaataacctgagtcaccattttctgctcgtcctgacgcagcggcgaccccagcagctcgcgcaaccgcgcgttctcctgtttgtactgccccagcatcagcaggtcgctgttttttagcagtaattcctggcgcagcgcccgattttccagctcaagctggtcgcgagaagccagcgtttgcgacacgctgtcgagcagttcacgagggccgtttgaaataaaatagaaaggactgacggcagtgtccatgtacgttcggatttgactgaacgtccccaggcggctgtcggcaatgataacgccgagcgccaccagcaccgccagaataaggcgaatctgtagcgacgggccacggctaaaaattggcttcataggctatgcgtattctcgcgtcggagaggcaggacaatccagggataatcctgcccgtatccaactactcttcgctgaacaggtcgccgccgtgcatatcgatcatttccagcgccttgccgccgccgcgcgccacacaggtcagcggatcttcagcaaccacgacaggaatgcccgtctcttccattaacagacggtcaaggttacgcaacagcgcgccgccgccggtgagcaccataccgcgctcggagatgtctgacgccagctccggcggacactgttccagcgccaccattaccgcgctgacgataccggtcaacggttcctgcaacgcttccagaatctcgtttgagttcagggtaaagccgcgtggaacgccttccgccaggttacggccacgcacttcgatctcgcggacttcgtcgcccggataagcggaaccgatttcgtgtttaatacgttctgcggtggcttcaccgatcagagaaccgtagttacgacgaacgtaattaatgatggcttcgtcgaagcgatcaccaccaatacggacagaagaagagtaaaccacgccgttcagggagataacggcaacttcagtggtaccaccaccgatatccacaaccattgaaccggttgcttcagaaactggcagacctgcgccgatcgcggccgccatcggctcttcgatcaaaaagacttcacgggcgcctgcgccctgagcggattcacgaattgcgcggcgttctacctgcgtcgcgccgaccggcacgcataccagtacgcgcgggcttgggcgcataaagctgttgctgtgcacttgtttaataaagtgctggagcattttttcagtcacgaagaagtcagcgataacgccgtctttcatcggacggatcgcagcgatattgcccggcgtacggcccagcatctgcttcgcatcatgaccgactgcagccacgcttttcggcgaaccggcacgatcctgacgaatggccacaacggaaggctcattcaatacgatgccttgtccttttacataaatgagggtattcgcggtacccaggtcaatggacaggtcattggaaaacatgccacgaaattttttcaacatactaagggataatcctgaaagctggggcggaaaacaaaatccgcttactttaccaaccacacgcagcagcgacaaggcgcaaaaatcatctgctacggtgaaaattagtgcagttcgtttcctttgttacaaatctcggcctgagtccctcagggctgaaaaaatcagcagcaatcctcgccttcgtttgcaacctgtcaaaggtcattcacctgcatatttgctgcaacaatctggcgagcagacaagcacacccccatgaggcgcagcgcgcgttattctacgtgaaaacaaattaaacggcaggttaaaccgagtatctttgcgaatattttttcacgtttgtgtcaagtagttgggaggaggcaaaaaaatcaccctgcccgccagccacgccgcgttttgtcagcgtctgccactcgccgcgcgaacggacgcccgtcgcgtaaacctgcgtaggcgtacccgcgcaggcctctaccagactttgaaccagaagctggttttccgttcgcttctcaatgtttctgaccagactcggatgcagcttgagtaattccacattgagcgctttaatccagctcgtgctaaccagcgtcaaacccgcctgtgtcaccgccacccgaacgccaagcgcattgactaagcgaaggatgggttgtaaccgacagatgtgttgacaaacatctgcctccgcaagttcaataattatgcgatttcgctgtgatttttcacactgcattaacgtatcgcgcaaccagcgctgaaaacgcggacgaatcagcgactcgaccgtcaactgcattgccagattttcatccggccagtagcccagcaacgtaatcaggcggctaatttgtaatctgtcatactcttccgataaaccaaattgcaacaccatcggcatatactccgccgagctcacctcttctttaccgtcatagatgcgacacatcaattcccgatgatgtacgcgaccttctcgcgtgaccgccggtttttgataaagtcgcggtccgccccggttcagcatctgctcaatcaatgtgcgccagcgcacattgccgcgccctttttccggcagcgtgtcgtcgtagatagcccagctatttcccccctgcagggcggcgttccgcgccgcggcttcagcatgttctatcacctgctcggtggactgtccgctgcgccaggcgcaaatgccgatatgtaccatatcgtcacgatcaagcattttgttagccggtagcgcatcgacagcttttaaaagttgtccggcaatactttccgcttctttcagcgttcgatgcggtagcagcacggcaaagtcgctgcggtgataacgcgccagcagcgagcctgggtaacgcataataaatgtcgatagcagattgataagcataaacatctgctcttccgcctgattgcctcccaggctgtcgcgcagaagattgaagtctggcaagcggatcatcatcaccacgccatgcactcccactttttcctgatcttccagcagcgtcgccagttggttatcaaagaacagacggttaccgagtccggttttggtgtcttgcgcggcgtaggagcgaatgagggtgtccaggcggctacgctgttcgtgagcaaactgaatttcggaaagcaatacatcaagcgcgctactggtgcgcgctggccattcgtaaacagaaccgcggacattcgccccgcgttcgccgttcagaatacgcgttgagcgaatttccagaagctcctgcccggaaagctgccgctgcagccagcgcaccgataaaaacaaaatcagaacgataaaaccgatcgccagcgttagcggcgccgtggtgatcagtgagtgaaaatagttacccatcgggtcctgataagccagacgtagcgacattcctggatgttttatcagcggtacgaccagctcgcgatacatgtcgctggtgccggctggccgataacctctggcacgagaatggctgtagacgctgcgctccccctgcaacagatcgacacgcacaatatcggaagcgatcatgagttcgtcgatttgcggcgtcagcgagacaatatcatgggtcaccaggtgcgtatcaatggctgtcgccgtcgcctgcacacggctgacatacttatactgtacggcgttataaaagcttagcgagcaacctatcagagtcacgaagatcgttaaccccgtgagcagcgtgataaaagctgagaatttcgtcgttaatcgcatccttgagttaactccgacggttataaacagtatgaaaaagcgaatctgaaggcggaattcgccacggcgcgcaatgaagcaggcatactaccaaaatggatctatctggcaatttattgcgttgcatcggcatcacgttttaattagcgagtatagtcttcgtagctatttttccaatctaccatgtaaagtgaggacaggttatgcaggcgttgatcttagaacagcaggacggtaaaaccctcgcatccgtgcaacatctcgaagagagtcaactgccggcaggtgatgtgacggtggatgtccactggtccagcctgaattataaagatgctctggctatcaccggaaaagggaaaattatccgtcattttccgatgattcctggtattgatttcgccggcaccgttcacgcaagcgaagatcctcgctttcatgcaggccaggaagtactactgactggctggggcgtgggcgaaaaccactggggcggcctggccgaacgcgcacgcgttaaaggcgactggctggtcgcgctgcctgcgggactgagcagccgtaacgccatgatcatcggcaccgccggttttaccgccatgctgtgcgtcatggcgcttgaagatgcaggtattcgcccgcaagacggtgaggttgtcgtcaccggtgccagcggcggcgtgggcagcactgccgttgcattactgcataagctgggctatcaggttgcagcagtatcaggacgtgaaagcacctacggctatcttaagagcctgggagctaaccgtattctcagccgcgatgagtttgctgaatctcgcccgttggaaaaacagctatgggccggtgcaattgataccgttggcgataaagtgctggcgaaagtgctggcacagatgaactatggcggttgcgtggccgcctgcggcctggcgggcggcttcgcgctgccgaccaccgttatgccattcattctgcgtaatgtgcgtttgcaaggggtggactcggtgatgaccccaccggcacgtcgcgcagaagcctgggcgcgtttggttaaggatctgccggaatcgttctatgctcaggccgccacagagattacgctggcggatgcgccgaagttcgccgatgccatcatcaataatcaggttcagggccgtacgctggtgaagataaaataacgtcacgtataaaaaaatttacacttaattaactatttatttttacacattgacacactccctgtcatattcactacacgccatgttgtggtgggtagaccgggagtctgtgatgaaaaagatacgtccattaacagaagccgatgtgactgcggaatcggctttttttatgcagcgccgacaggtgctaaaagcattaggcatcagcgcggccgccttatccttaccctcaacggcgcaggccgatctcttcagttggtttaaaggcaacgatcgtccgaaagcgcctgccggtaaaccgcttgagtttagtcagcctgccgcctggcgaagcgatttagcgttaacgccggaagataaggtgacgggctacaacaatttctatgagtttggccttgataaagccgacccggcggccaatgccggaagtctgaaaaccgaaccgtggacgttgaaaatcagcggggaagtcgcgaagccatttacgctggattatgacgatttaacacatcgtttcccattagaagagcgtatctatcgaatgcgctgcgtcgaagcgtggtccatggtcgtgccgtggattggtttccctttatataagctactcgcgcaggcacagcccaccagccacgctaaatatgtggcattcgaaacgctatacgcgccggatgatatgccaggacagaaagatcgttttattggcggcggactgaaatacccttatgtcgaagggctacgtctggacgaagccatgcatccgctgactctgatgaccgttggcgtctatggtaaggcgttacccccgcaaaacggcgcgcccattcgactcatcgttccatggaagtatggttttaaaggtattaaatctattgtcagcattaaactcacccgcgaacgtccgctaaccacctggaatttgtcggctcccaacgaatatggtttttacgccaatgtgaacccgcatgtggatcatccacgctggtctcaggctaccgaacgctttattggttcaggcggtatcctcgatgtgcaaaggcagccgacgctgctgtttaacggctatgccaatgaagtcgcttcgctgtatcgcggtctcaatttgcgggagaatttttaagtgcgtctgacagcaaaacagataacctggctaaaagtttgtctgcatcttgccggttttttgccgcttctgtggctcttttgggcgataaatcacggtggactcagcgcagacccggtaaaggatatccaacactttaccggcagaaccgcgctcaaatttttgctcgccaccttgctggtttcaccgctggcgcgctacgctaaacagccattattgatacgcacacgccgcctgttggggttatggtgtttcgtttgggctacgctgcatttaaccagctatgccttactggaactggggatacataacctggcgttgttaggaagcgagttgatttcacgcccttatttgacgcttgggatcattagctggctggtgttattggcgctgacgttgacctcaacgcaatttgcgcagcgtaaattgggcaaacgctggcaaacactgcataacgtcgtctatcttgtcgcgatcctggctcccatacattacctgtggtcggtaaagattttatcaccgcaaccggtcatctacgcggcattagcgttagcccttttagcgttgcgttaccggaggtttcgccagtggtggcgctagtttggtgaactgtgcggtcgattgcaaaacgcaaaacaggtaatgtcctttttatgtttcgggttgattatcttccctgataagaccagtatttagctgccaattgcgacgaaatagttataatgtgcgactttacattccccaacggcgattttcgttcgcagaaagggtgacaatcgagcaatgaaggtatattttgttttttgcccgaaaatggcagaagatagccacacaatgactggcaaatcatgaatttcaccttcgtgtgctacggcataacaggcaaatcaaagatgcgcggtattttacccgcggcagtcattcacatgctttacagacggcgctaaaacgcctgtcacaatcacactaaacaaagagtacggaacccactcatggatattcgtaagattaaaaaactgatcgagctggttgaagaatcaggtatctccgaactggaaatttctgaaggcgaagaatctgttcgcatcagccgcacaacggcaaacgccggttttccggtgatgcagcaggcttatgcggcgccgatgatgcagcaacccgctctgtctaacgctgtcgcgccagcggctactccagcaatggaagcgcctgccgcagcggaaatcagtggtcacatcgtacgctccccaatggttggtactttctaccgcaccccaagcccggacgcgaaagcgttcatcgaagtgggccagaaagtgaacgtgggcgataccctgtgcatcgttgaagccatgaaaatgatgaaccagatcgaagctgacaaagcaggtactgtgaaagcgattctggtcgaaagtggtcaaccggtagaatttgacgagccactggtcgtcatcgagtaacgaggcgaacatgttggataaaattgtcatcgccaaccgcggcgagatcgcactacgtattcttcgagcctgtaaagaactcggcatcaagaccgtcgctgtgcactcaagcgcggatcgcgatttaaaacacgtattgctggcggatgagacggtctgtattggcccggcaccgtccgtaaaaagttatctgaacatcccggctatcattagcgccgctgaaatcaccggcgcggtggcaatccacccgggttacggcttcctttctgagaacgccaattttgccgagcaggttgaacgctccggctttatctttatcggcccgaaagcggacaccatccgcctgatgggcgataaagtgtccgcgattaccgcgatgaaaaaagcgggcgtgccgaccgtaccaggatctgacggcccgctgggcgacgatatgaatgcgaaccgcgctcatgccaaacgtattggctatccggtgatcatcaaagcgtccggcggcggcggcggccgcggtatgcgcgtggttcgtagcgatgctgaactggcgcagtccatctccatgaccaaagcggaagcgaaagcggctttcagcaacgacatggtatacatggaaaaatacctggaaaatccacgccacatcgaaattcaggtgctggcggacggccagggcaacgctatctatctggcggaacgcgactgttccatgcagcgtcgccaccagaaagtggttgaagaagccccggcgccaggcattacgccggaactgcgtcgctatatcggcgaacgctgcgcgaaagcgtgcgtagacatcggctatcgcggcgcagggacgttcgaattcctgttcgaaaacggcgagttctatttcatcgaaatgaacacccgtattcaggttgaacacccggtgactgaaatgattaccggcgtcgatttgatcaaagagcagttgcgcatcgcggcgggtcagccgctgtcgatcacacaggacgaagttgtcgttcgaggccatgcggtagaatgccgtatcaatgccgaagatccgaacaccttcctgccaagcccaggcaaaatcacgcgcttccatgcgcctggcggctttggcgttcgctgggaatctcatatctacgcgggctacacggtgccgccgtactatgattccatgatcggcaaactcatctgctacggtgaaaaccgcgacgtggcgattgcccgtatgaaaaatgccctgcaggaactgattatcgatggtatcaaaaccaatatcgatctgcagacccgcatcatgaatgacgagcacttccagcacggtggaaccaacatccactatctggagaaaaaactcggtcttcaggaaaagtaatcgcacgttaatctcaaaaggccggtgaatccggccttttttatttctggggatagcgatgccccatcatgtacaattcccgctttcttcacccataagggacaaaaaatggacgctcgttttgttcaggcccataaagaggcgcgctgggcgctgtggctgaccctttgctatctggcggcatggttagtggctgcttacttacctggagactcgccgggaattaccggtctgccgcactggttcgagatggcctgcttattgacgccgctggtctttattttgctgtgctgggcgatggtgaaattcatttatcgcgatatttcgctggaggatgacgatgcagcttgaggtcattctaccgctggtagcctatctggtcgtggtcttcggggtctcgatttacgctatgcgcaagcgtaccgccggcacttttttaaacgaatattttcttggcagccgttcgatgggcgggatcgtgctcgcgatgacgcttaccgccacctatattagcgccagttcatttatcggcggtcccggcgcggcttataaatacggtctgggctgggtcttgctggcgatgatccagcttcccgccgtctggctttcactgggtattctgggtaaaaaattcgctatcctggcgcgtcgctataatgccgtcacgcttaacgatatgctattcgcgcgttaccaaagccgcctgctggtgtggttggcaagcctgagtttattggtcgcgtttattggcgcaatgaccgtacaatttatcggcggcgcgcgactgctggaaaccgcggcgggaattccctacgaaaccggcctgctaatatttggcgtcagtatcgcactctatacggcgtttggcggctttcgcgccagcgtacttaacgatacgctacagggcctggtgatgctggtcggcacgatagtgctgctggtgggcgtgatccatgcggcgggcggtctaagtcaggccgttgacacgctgcacgctctcgaccccaaactggtaacgccgcagggcgccgatgacatactttctcccgcctttatgacctctttttgggtactggtctgttttggtgtgattggcctgccgcatacggcggtgcgctgcatctcctataaagacagtaaagcggtacaccggggcattattatcggtacgattgtcgtggcgattttaatgttcgggatgcaccttgccggcgcgctgggtcgcgcggtgcttccggatctgacggtgccggatctggtgatcccaacgctaatggtgaaagttttgccgccgtttgccgccgggatcttcctcgctgcgccaatggcggcgatcatgtcaacaattaacgcccaactgctgcaaagttccgcgacgatcattaaagatctctatctcaacctgcgccccgatcagatgcaaaatgagatccggctgaagcgtatgtcggcagcgattacattactgctaggcgcgctgttgctgctggccgcatggaaaccgccagagatgatcatttggctcaacctgctggcgtttggcggcctggaagcggtgttcttatggccgctggtattgggcctttactgggagcgggcaaacgcggcaggcgcattaagcgccatgatcgtgggcggcgtgctatatgccctgcttgccacatttaatattcagtacctgggctttcatccgattgtgcccgcgttactgttaagtttattggcttttctgatcggaaaccgattcggctcttccgcttcgcaagccaccgtattgtctactgataaataaagagttttgccatgccatggatccaattgaaactgaataccaccggcgcgaatgctgaagagctgagtgatgcgctgatggaagcgggcgccgtttccattacctttcaggatacgcacgatacgccggtttttgagccgttgccgggcgaaacccgtctgtggggcgataccgatgtgatcggtctgttcgacgccgaaaccgacatgaaagacgttgtcgcgattctggagcaacatccgctgctgggtgccggatttgcccataaaatcgaacaactggaagataaagactgggaacgcgaatggatggataatttccatccgatgcgttttggcgagcgtctgtggatttgtcccagctggcgtgacattccggacgagaatgccgtcaacgtgatgctcgacccgggactggcgttcggtacgggtacgcaccccaccacctctttatgtctgcaatggctggacgggctcgatctcaacggcaaaaccgtgatcgactttggctgcggttcaggcattctggcgattgccgcgctgaaactgggagcggcaaaggcgattggtattgatatcgatccgcaagctattcaggccagtcgcgataatgctgaacgcaacggcgtgtctgaccggctggagctgtacctgccgaaagaccagccagaagccatgaaagccgacgtggtcgtcgctaacatcctggcaggcccattacgcgaactggccccgttaatcagcgtactgcccgttgaaggcggtctgctggggctttcaggtattctcgccagccaggcggaaagcgtctgcgatgcttacgccgagcttttcactctcgacccggtcgtcgaaaaagaagaatggtgccgcattactggccgtaagaaataattcttgtcagcgtggtcgcccggccacgcttttctccacacaactgccttaacgcctttcaggcaccgagacatcattaaattcatcaaatgaatgcctgaaataacttctttgtcactatccgtctggataaacagctgctaccagcggacaaaagatactggcgttttaacgggtcgcagccatcgccctcgtacttagtaatgctgtccgggttgttctgcagcatccgctaaccctctcttcagcgcagctggaaaaatttatccgtgccattcatgaacacaaaagcgcatctgtgcgcccccttccgactggcaatggagaaaaatcacgcgcagcgggaagtgatcttgtcctgaaacgagacggcgatcccattcatttggggtaattagcttataaaaaaagcagattattccgcttatcttgtttctggacgaagaaatagagagaagttacgggaatttgtaagcgcgtacaaaaccgccgacaataaataaccctatgattttactgaattataaatttattttgctgtttttaagcacgattcattgatctacaacagtggattgttcaaagtttggcctttcatctcgtgcaaaaaatgcgtaatatacgccgccttgcagtcacagtatggtcatttcttaactcatgcgcatcggacaatatcagctcagaaatcgcctgatcgcagcgcccatggctggcattactgacagacctttccggacgctgtgctatgagatgggagcaggattgacagtatccgagatgatgtcttctaacccgcaagtgtgggaaagcgataaatctcgtttacggatggtgcacgttgatgagccaggaattcgcacggtgcaaattgccggtagcgaccctgttgagatggccgatgccgcacgtattaacgtggaaagcggcgcccagattattgatatcaatatggggtgcccggcgaagaaagtgaatcgtaagctggcaggttcagccctcttgcagtacccggatttagtgaagtctatactcatcggggtcgtaaacgcagtggacgttcctgtgactctcaagattcgcaccggctgggcgccggaacaccgtaactgcgtagagattgcccaactggctgaagattgtggtattcaggctctgaccatccatggccgcacccgcgcctgtttgttcaacggagaagctgaatacgacagtattcgggcagttaagcagaaagtttccattccgattatcgcgaatggcgacattactaacccgcataaagccagagctgttctcgactatacaggggcggatgccctgatgataggccgcgcagctcagggaagaccctggatctttcgggaaatccagcattatctggacactggggagctgcttccgccgctgccgctggcagaggtaaagcgcttgctttgcacgcatgttcgggaactgcatgacttttacggtcaggcaaaagggtaccgaatcgcgcgtaaacacgtctcctggtatctccaggagcacgctccagacgaccagtttcggcgcacattcaacgctattgaggacgccagcgaacagctggaggcgttggaggcatacttcgaaaattttgcgtaaacagaaataaagagctgacagaactatgttcgaacaacgcgtaaattctgacgtactgaccgtttctaccgttaactctcaggatcaggtaacccaaaaacccctgcgtgactcggttaaacaggcactgaagaactattttgctcaactgaatggtcaggacgttaatgacctgtatgagctggtactggctgaagtagaacagcccctgttggacatggtgatgcaatacacccgtggtaaccagacccgtgctgctctgatgatgggcatcaaccgtggtacgctgcgtaaaaaattaaaaaaatacggcatgaactaatttcgattagctaactgcttgtttaaaaaggcgctactcggcatggggaagcgccttttttatacgcatcacatggaatttggtcatgaaagcggaatgtgaacctcagtactttggcgatgaatcgaagaagattattcacggtgacgcgctaacagaacttaaaaaactgccttctgaaagcattgacttaatttttgccgatccgccttacaatatcggaaaagatttcgacggtatggtggagtcctgggacgaagcgtcttttctggcctggctgtatgaatgcattgatgagtgccaccgcgtactgaagaaacacggcaccatgtacatcatgaatagcacagaaaatatgccgtatatcgatctcaaatgccgaacgctttttaccatcaaaagccgtatcgtctggtcctatgatagttccggggtgcaggcgaaaaaatactttggttctatgtatgaaccgatcctgatgatggtaaaaaacccgaaaagctatacctttaaccgtgatgcgattctggtcgaaaccactacgggcgctaagcgcgcgctaatcgattatcgaaaaaacccgccccaaccatacaatcagaaaaaagtgccgggcaacgtctggtcatttcctcgcgtacgttatctgatggatgaatatgaaaaccatcctacgcaaaagcccagcgcgctgttaaaacggatcatactggcctcttctaacccgagcgataccgtattggaccctttcgcgggcagtttcaccacaggcgctgtcgcagcggcgtcaggtcgtaagtttatcggtattgaactcaataatgagtacgtaaaaatggggctcagaagattgagcgtcacttcgcattattcagaaaatgaacttgcaaaagtcaaaaagagaaaaacacaaaacctgtccaaaaagcagcgaaatgtcgggataaacgcgctatcttcagagaagtaaaagcattgtaagtccgcttttcagcgtcaaaatttcatgtatattcccagcacgcatgggcatgaatacacaggatttgacgatgatacgtaagtattggtggctggttgtttttgccgtctccgtttttctttttgatgcgcttttgatgcaatggatcgaattgatggcaactgaacaggataagtgccgaaacatggattcggttaaccctctcaaattgatcaattgtaccgatctggagtagcgaaccgggcgatttaacctatgattatttatcacccggatttcttttatcccttataaaaacagggaattaaaacacgttgaggataaaagaaggggtgatactgtctcgtcctgttcttttcctgcataaccaatgagctaatgatacatgccggttagtgagtacaaccacatccttgtggcggtttcatttgctgtcgctatttttgcgtcctataccgcattaaatatggccggacgcgtagcaggaagcgcccgatcaaacgccagaatatggctaatgggcggcggcttcgcgctgggcgtcggtatttgggcgatgcattttgtcgggatgctggcgatggatcacgcgatgaacatgcgcttcgatccgttcctcaccggcctctccatgctgatcgcgatcggctcctccctgtttgcgctatggctggtcagcgctgaaaaactgcgcctgcgccgtttactgccgggcgcgctggtgatgggactgggcatcagcgcaatgcattataccgggatggcggcgctgcaatttgcttccattatcgtctggaatagcgcgtgggttgccctctctatcattatcgcgctactggcgtcctgcggcgcgctgtggctcacgttccgcctgcgtcatgagggaacagatgtcgccctgaggcgagcaggcgccgcggtattaatggggatagctatcgccggcatgcattacgccggcatgaaggccgcacactttccccaaaactggccgatggagcatcgtggcgtcgatagcaactggctggctgttcttgtcagcgtggtcgcgctgactatcctgggtattactctgctggtttctttatttgacgcccggcttcaggcccgtaccgcactacttgcctcttcgctggcgcaggcgaaccaggaactggcgcagttggcgctgcatgatacgctcacccgtttaccaaaccgggtgcttcttgaggatcgtctggaacaggccatcagcaaagcgaatcgggaaaacacgtctttcgcgctactgtttatggatctggatggctttaaaaccgttaatgacgcttatggtcatgatatcggcgataagctactggtagcggtcacgcatcgtctgaaccaaccgctgagcgggcagtttaccctggcgcggattggcggcgacgaatttgtgctgcttgcagaagtcagcgcgcctgacgaagcggcttcccttgccagcgcgctggtacattcgatagatgcgccctttacaatagatccgtacgaactggtcgtcacccttagcgtgggaatagcgctctatccgctggacggaaaaaacgaacgggaactgatgttcaacgccgatgccgcaatgtaccacacgaaacatacggggcgtaacggataccatttctttcagccatcaatgaatatgctggcgcaaacccaacttcagctaatgaatgacctgtggctggcgctggaaagacaagagctcaggttagtgtatcagcctaaatttcaggcttctgccggccctattgtaggatttgaggccctgttgcgctggtatcatccaaaacaaggcgtactgaatcctgaccagtttttaccgctggcggaaaaaacgggtcttatcgtcactatcggtagctgggtgatagacgaggcgtgtcgacagctccgcgagtggcacttacagggatacgacttatggtcagtggcggtaaatctgtccgccttacaatttgagcagcccgggcttgtggacaccattacgcggagcctggcccgacacagtatccgtcccgatttattgattctggaaatcaccgaaaccacggcgatgaacaagccagagcaaagcgtcgctatactcaccagattaacggaaatgggggttaaggcctctattgacgactttggcaccggttattccagccttctctatctgaaacgtcttccggcgtgcgaactaaaaattgatcgcgctttcgtacatgaactcagcgaggcaggcgacggcgcgaccattgttgcggctattgtcgcgctggcgaaagcgttaaatctgcaaattgtggcagaaggggtagagaatgaaacgcagcaacaatttttgacccagttaggatgccatacgcttcaggggttcctgcttggcaagccgcgtacggcagaggaaattgctcgcgatattcgggatcctgccaatatattcacaaggtcaatatataatatcaactcaaaataatctcaggcttcttccgcctgttgttcatttggcattaattgcctcacactgccatccgggcttagcatttttaatacattatcgactaatgcaggcgcctgcttataaagatcataacttgtgggattcattaaccagttttttactattccgctaaaactaccatgcagaataattaatatgacatccagatcaagactgcctgagatcagttttttatccatacatcgctgtaatacttcaagcagcgactgatgatggaaacccatcttctcccgaatggcctgttccgatatcataccattatggaattcacatttatgatataaaatctgcattaatgcctgctgacgaggcactgccgcaatatattgtaaggctgcaataaatttctctcgtagatcctgtaaaggattatcattccagcatcccgtaagcctatcctgaataagttcgcgtaaaggtggttgctgtaaccaaacctcattaaacaactgcgttttattctcaaagtgccagtagatggcgccccgcgtgacatcagcggcatcagcgatatcattcaacgtcgtgttggcaacgccgcgcaaagcgaactgcgcaatagcggtttcaatcaaatgttgccgcgttttaagcgcatccgccttcgttttcttcgccataattaagatatcctggaccataaaaacgataaatacgctgataaaatactcagcacaaaaaacaactttatcatgtcctttttagtcagacgagagacagctatttttatttcgcacaatatcgccaaatcaataataaaaacaaataaattaataaaacacattcatataaaatatatatttctatttatgttattcaacatcatgattttactaatcgggacattatgaaacgacagggaatagttctttttttttgcttttatgtgccgtgaaccccatcccaaaataagtattgcttacatcacaagctaataatttgtaggataccccactgctattctatttttcgcgcgttaacgccttaccgttatccggtgaataacgagctttcggttttttaaggaacagtaatgacgaaacatgccaggttttcactcctgccctcattcatcatattctctgctgcgctgctggccggttgtaatgaccagggagatacccaggctcatgccggcgagccgcaagtcaccgtccatgtggtcgaaacagcgccgctagccgtaacgaccgaacttcccggacgtacgtccgcatttcgcattgcggaggttcgcccccaggtgagcgggatcgtgcttaaaagaaacttcaccgaaggtagcgatgtagaggccgggcagtcgctctatcagatcgatcctgccacttatcaggctgattatgacagcgctaaaggcgaacttgctaaaagcgaagcggctgcggctatcgcgcacctgacggtcaaacgctatgttccactggtcggcacaaaatatatcagccaacaggaatatgatcaggcgattgccgacgcccgccaggccgatgccgccgttgtggcggcaaaagccgctgttgaaagcgcgcgtattaaccttgcgtataccaaagtcacctcacccatcagcgggcgtataggaaaatctaatgtgactgaaggcgcgctggtgactaatggtcagtcaactgaactggctaccgtgcaacaactcgatccgatttatgtcgacgtgacgcaatcaagcaacgactttatgcgactcaagcaatccgtcgaacaaggtaacctgcataaagacagcgccagtagcacggttcaactggtaatggaaaatggtcaggtctacccgattaaaggcacgctgcaattttccgacgttaccgtagatgaaagcaccggctctatcacgctcagggcggtgttccctaacccgcaacacagtctgcttcccggtatgtttgttcgcgcccgcattgatgaaggcgtccagcccaatgccatccttgtcccccagcagggcgtaacccgcacgccgcgcggcgacgcaatggtgatggtggttaacgataaaagccaggtcgaagcccgcaatgtcgtggcggcgcaggctattggcgataaatggctcatcagcgaagggttaaaaccgggcgataaggtcatcgtcagcggcttacaaaaagcgcgaccgggcgtccaggtgaaagccactaccgatgctcctgcagcgaaaacggcgcaataaggtaaccgtacatggcaaacttttttattagacgtcctattttcgcctgggttctggccattatcctgatgatggctggcgcactggcaataatgcaacttcccgttgcgcagtatccaaccattgcgccgccagcggtttctatttctgcaacctatcctggcgcggatgcgcagacggtacaggatacggttactcaggttatcgaacaaaatatgaacggtatcgataacctgatgtatatgtcctctaccagcgactctgctggtagcgtgaccatcaccctgaccttccagtccggaaccgatccggatatcgcgcaggttcaggtgcaaaataaattgcagctcgccacgcctttactgccgcaagaagtccagcagcaggggattagcgttgaaaaatccagcagcagctttttgatggtcgccgggttcgtctcagataatccgaacactacccaggacgacatctctgactatgtcgcctctaacattaaggattctatcagccgtctgaatggtgtgggcgacgttcagctatttggcgcacagtacgccatgcgtatctggctggatgcgaatctgctaaataaataccagctcacgccagttgacgtcatcaaccagttaaaagtacagaacgaccagattgcggcaggccaactgggcggcacgccagcattaccgggccagcagcttaacgcctcaatcatcgcccaaacgcgtctgaaagatccggaagagttcggcaaagttacgttgcgcgtcaataccgacggctctgtcgtccatctcaaagatgtcgcgcgtattgagcttggcggtgaaaactataacgttgtagcgcgcattaacggtaaaccggcctccggtctcggtattaaactggcgaccggcgctaacgcgctggataccgcaaccgcaatcaaagcgaaactggcggagctgcagcctttcttcccccagggaatgaaggtggtttatccttatgacacaacgcccttcgtaaaaatatctatccacgaagtggtaaaaacgctgtttgaagcgattattctggtgttcctggtaatgtatctgttcttacagaatatccgggcaaccctgattcctaccatcgctgttcctgtcgtgttgctaggcacttttgcggtactcgccgcctttggctattccatcaataccctgacgatgttcggcatggtactggcgatagggctgttggttgacgatgcgatagtggtcgtagaaaacgttgaacgtgtaatgatggaggataaccttcctccccgagaggcgacggaaaaatccatgtcgcagattcagggagcgctggttggtatcgcgatggtactgtctgcggtatttatcccgatggccttttttggcggctcgaccggggcaatttatcgccagttctctattactattgtttcagcaatggcgctatccgttctggttgcgttgattctgacgccagcgctgtgcgctacgctgcttaaacccgtatctgctgaacatcacgagaaaaaaagcggcttctttggctggttcaataccaggtttgaccacagcgttaaccactatactaacagcgtaagcggcatcgtgcgtaatacgggtcgctatctcattatctatctacttattgtagtcggaatggcggttctgtttttacgcctcccgacctccttcctgccggaagaagatcagggggtattcctgaccatgattcagctcccctctggcgctacgcaagaacgtacgcagaaagtgctggatcaagtcactcattactacctgaataatgaaaaagcgaacgtcgaaagcgtgtttaccgtaaacggctttagctttagcggtcagggacaaaactcagggatggcatttgtcagccttaaaccctgggaagagcgtaacggtgaagaaaatagcgtcgaagccgttatcgccagagcgacacgcgccttcagccagattcgcgacgggttggtgttccccttcaacatgccagcaattgtcgagttaggtaccgcgacaggtttcgactttgaactgattgatcagggaggactcggtcacgatgcgttaacaaaagcgcgtaatcaactcctgggtatggtcgcgaagcatcctgacctattagtgcgcgtacgcccgaacgggctggaagacacgccacagttcaagctggatgtcgatcaagaaaaagcgcaggcgctcggtgtttcgctgtctgatatcaacgaaaccatctccgcggcgttgggcggctattacgttaacgactttatcgatcgcggacgagtgaaaaaagtatacgttcaggctgacgctcagttccgtatgctgccgggagatatcaacaatctttatgtacgcagcgccaatggcgagatggtgcccttctctacctttagctcagcacggtggatttatggttcgccacgcctggaacgctataacgggatgccgtcaatggaactgctcggtgaagcagcgcccggacgaagtaccggtgaagccatgtcgttaatggaaaacctggcttcacagctgccaaacggtattggctatgactggacaggtatgtcgtatcaggaacggttgtcaggtaaccaggcgccggcgctgtacgcaatctcactcattgtcgttttcctctgccttgccgctctgtatgaaagctggtcaattccgttctcggtaatgctggtcgtaccgctcggcgtggttggcgctctgcttgcagcgtcattgcgcggtctgaacaatgacgtttacttccaggttggcttgttaaccactattggcctttctgctaaaaacgccatcctgattgtcgagttcgccaaagatctcatggaaaaagaaggacgtggattgattgaagcgacgctggaagcatcccgtatgcgtttacgtcctattctaatgacctcgctggcctttattctcggggtaatgccgttagttatcagtcgtggcgcaggtagtggggcacagaacgcagtaggcacaggggttatggggggaatgttaaccgcaaccttattagctatcttcttcgtgccagtattcttcgttgttgtaaaacgccgatttaatcgccatcatgattaaccggtaaacagaggcgtcttcggacgcctttttaaacggtacgtctttatctccgctattcccccctctccgcttacctctgcattctccatagtttttacaattcacatgaattgagatgattcctcatgtcggccattttttctgtggtggtaaaataactctcgttttcgcagcggttagagccagcatttacgttgctgtacttcgcgaaacgctgattaatgaggtaacaccatgaaaagactaattccagttgcattgcttaccaccttattggcaggttgtgcacatgattctccctgcgtaccggtttatgacgatcaagggcggctggttcataccaatacatgtatgaaaggtacaacgcaggataactgggagacagcaggcgctatcgctggcggcgctgcggcggtagcagggttgacgatgggtatcattgcgctttctaaatgatacatgcaggcgcggcaatgccgcgctttcagtaataatataaaggtcgtaaggatactcagcgacgtaatctgttcagtctatcccccgaaagttaacacgataaaacgctcccttttcttactcgcccatcccgatggtatttattctattccttgtccgatgcagacaaaattatagcttgatagcatcgtaagccgcattacaaacaggctttatacagtaagacttagagcgtgatcattaggcgtaattattacagacagtctggatataaaccggaacatacacgtaatacatgaggattttgagcactgtccctaggccaaactggcaaataaaatagcctaatgggccagatttttagtcctcagcgaatatctctattgcttattagaggcgtaagtaaaagccgtttgtacatctacttcagcacggttcacattcgatggttcaggcggatatatggcgggaaatcacgttgactaaaacggtttttatccactctacgaagatgtttaaaacgcgtcggcgtcattatccgataactttttccatagagagataaatgcaaaaaggcccagtctttcgattgggccctttgctttatttgatgtctggcagtttatggcgggcgtcctgcccgccaccctacgggccgttgctgcgcaacgttcaaatccgctcccggcggatttgtcctcctcaggagactactcaccgacaaacaacagataaaacaaaaggcccagtctttcgactgagccttttgttttatttgatgtctggcagttccctactctcgcatggggagaccccacactaccatcggcgctacggcgtttcacttctgagttcggcatggggtcaggtgggaccaccgcgctactgccgccagacaaattctttttcaaataccgaactttaaccgtattaagtggtgctgatacccagagtcgaactggggacctcacccttaccaagggtgcgctctaccaactgagccatatcagcacactaaatttgatgcctggcagttccctactctcgcatggggagaccccacactaccatcggcgctacggcgtttcacttctgagttcggcatggggtcaggtgggaccaccgcgctactgccgccaggcaaattctgttatcagaccgtttttacgttctgatgtaatctgaatcagtgctgaaaatcttctctcatccgccaaaacatcttcggcgttgtaaggttaagcctcacggttcattagtaccggttagctcaacgcatcgctgcgcttacacacccggcctatcaacgtcgtcgtcttcaacgttccttcaggagactctaagtctcagggagaactcatctcggggcaagtttcgtgcttagatgctttcagcacttatctcttccgcatttagctaccgggcagtgccattggcatgacaacccgaacaccagtgatgcgtccactccggtcctctcgtactaggagcagcccccctcagttctccagcgcccacggcagatagggaccgaactgtctcacgacgttctaaacccagctcgcgtaccactttaaatggcgaacagccatacccttgggacctacttcagccccaggatgtgatgagccgacatcgaggtgccaaacaccgccgtcgatatgaactcttgggcggtatcagcctgttatccccggagtaccttttatccgttgagcgatggcccttccattcagaaccaccggatcactatgacctgctttcgcacctgctcgcgccgtcacgctcgcagtcaagctggcttatgccattgcactaacctcctgatgtccgaccaggattagccaaccttcgtgctcctccgttactctttaggaggagaccgccccagtcaaactacccaccagacactgtccgcaacccgggtaacgggtccacgttagaacatcaaacattaaagggtggtatttcaaggtcggctccatgcagactggcgtccacacttcaaagcctcccacctatcctacacatcaaggctcaatgttcagtgtcaagctatagtaaaggttcacggggtctttccgtcttgccgcgggtacactgcatcttcacagcgagttcaatttcactgagtctcgggtggagacagcctggccatcattacgccattcgtgcaggtcggaacttacccgacaaggaatttcgctaccttaggaccgttatagttacggccgccgtttaccggggcttcgatcaggagcttcgcttgcgctgaccccatcaattaaccttccggcaccgggcaggcgtcacaccgtatacgtccactttcgtgtttgcacagtgctgtgtttttaataaacagttgcagccagctggtatcttcgactgacttcagctccatgagtaaatcacttcacctacgtgtcagcgtgccttctcccgaagttacggcaccattttgcctagttccttcacccgagttctctcaagcgccttggtattctctacctgaccacctgtgtcggtttggggtacgatttgatgttacctgatgcttagaggcttttcctggaagcagggcatttgttgcttcagcaccgtagtgcctcgtcgtcacgcctcagtgttaaagtgaaccggatttacctggaacacacacctacacgcttaaaccgggacaaccgtcgcccggccaacatagccttctccgtccccccttcgcagtaacaccaagtacgggaatattaacccgtttcccatcgactacgcctttcggcctcgccttaggggtcgactcaccctgccccgattaacgttggacaggaacccttggtcttccggcgagcgggcttttcacccgctttatcgttacttatgtcagcattcgcacttctgatacctccagcatgcctcacgacacaccttcacaggcttacagaacgctcccctacccaacaacacacagtgtcgctgccgcagcttcggtgcatggtttagccccgttacatcttccgcgcaggccgactcgaccagtgagctattacgctttctttaaatgatggctgcttctaagccaacatcctggctgtctgggccttcccacatcgtttcccacttaaccatgactttgggaccttagctggcggtctgggttgtttccctcttcacgacggacgttagcacccgccgtgtgtctcccgtgataacattctccggtattcgcagtttgcatcgggttggtaagccgggatggccccctagccgaaacagtgctctacccccggagatgaattcacgaggcgctacctaaatagctttcggggagaaccagctatctcccggtttgattggcctttcacccccagccacaggtcatccgctaatttttcaacattagtcggttcggtcctccagttagtgttacccaaccttcaacctgcccatggctagatcaccgggtttcgggtctataccctgcaacttaacgcccaattaagactcggtttccctccggctcccctattcggttaaccttgctacagaatataagtcgctgacccattatacaaaaggtacgcagtcacacaggtaaacctgtgctcccactgcttgtacgtacacggtttcaggttctttttcactcccctcgccggggttcttttcgcctttccctcacggtactggttcactatcggtcagtcaggagtatttagccttggaggatggtccccccatattcagacaggataccacgtgtcccgccctactcatcgagctcacagcacatgcgcttttgtgtacggggctgtcaccctgtatcgcgcgcctttccagacgcttccactaacacacatgctgattcaggctctgggctcctccccgttcgctcgccgctactgggggaatctcggttgatttcttttcctcggggtacttagatgtttcagttcccccggttcgcctcattaacctatggattcagttaatgatagtgtgacgaatcacactgggtttccccattcgggtatcgccggttataacggttcatatcaccttaccggcgcttatcgcagattagcacgcccttcatcgcctctgactgccagggcatccaccgtgtacgcttagtcgcttaacctcacaacccgaagatgtttcttacgattcatcatcgtgttgcgaaaatttgagagactcacgaacaactttcgttgttctgtgtttcaattttcagcttgatccagatttttaaagagcaaatatctcaaacgtgactcgtaagtcagttttgagatactgatggcaacgcctttcacacattaccgcgcaagtggcgtcccctaggggattcgaacccctgttaccgccgtgaaagggcggtgtcctgggcctctagacgaaggggacactgaagtctcaatcgcaagacgccttgctttttacttttcatcagacaatctgtgtgagcacttcaaagaacagttctttaaggtaaggaggtgatccaaccgcaggttcccctacggttaccttgttacgacttcaccccagtcatgaatcacaaagtggtaagcgccctcccgaaggttaagctacctacttcttttgcaacccactcccatggtgtgacgggcggtgtgtacaaggcccgggaacgtattcaccgtggcattctgatccacgattactagcgattccgacttcatggagtcgagttgcagactccaatccggactacgacgcactttatgaggtccgcttgctctcgcgaggtcgcttctctttgtatgcgccattgtagcacgtgtgtagccctggtcgtaagggccatgatgacttgacgtcatccccaccttcctccagtttatcactggcagtctcctttgagttcccggcctaaccgctggcaacaaaggataagggttgcgctcgttgcgggacttaacccaacatttcacaacacgagctgacgacagccatgcagcacctgtctcacagttcccgaaggcacaaatccatctctggattcttctgtggatgtcaagaccaggtaaggttcttcgcgttgcatcgaattaaaccacatgctccaccgcttgtgcgggcccccgtcaattcatttgagttttaaccttgcggccgtactccccaggcggtctacttaacgcgttagctccggaagccacgcctcaagggcacaacctccaagtagacatcgtttacggcgtggactaccagggtatctaatcctgtttgctccccacgctttcgcacctgagcgtcagtctttgtccagggggccgccttcgccaccggtattcctccagatctctacgcatttcaccgctacacctggaattctacccccctctacaagactcaagcctgccagtttcgaatgcagttcccaggttgagcccggggatttcacatccgacttgacagaccgcctgcgtgcgctttacgcccagtaattccgattaacgcttgcaccctccgtattaccgcggctgctggcacggagttagccggtgcttcttctgcgggtaacgtcaattgctgcggttattaaccacaacaccttcctccccgctgaaagtactttacaacccgaaggccttcttcatacacgcggcatggctgcatcaggcttgcgcccattgtgcaatattccccactgctgcctcccgtaggagtctggaccgtgtctcagttccagtgtggctggtcatcctctcagaccagctagggatcgtcgccttggtgagccgttacctcaccaacaagctaatcccatctgggcacatctgatggcaagaggcccgaaggtccccctctttggtcttgcgacgttatgcggtattagccaccgtttccagtagttatccccctccatcaggcagtttcccagacattactcacccgtccgccactcgtcagcgaagcagcaagctgcttcctgttaccgttcgacttgcatgtgttaggcctgccgccagcgttcaatctgagccatgatcaaactcttcaatttaaaagtttgatgctcaaaggattaaacttcgtaatgaattacgtgttcactcttgagacttggtattcatttttcgtccgaggacgttaagaatccgtatcttcgagtgcccacacagattgtctgataaattgttaaagagcagtgcaacgcggctttcgctcaccgttgcgaggtggcgtatattacgctttcctctttcagagtcaaccctgaatttcaggatttttctcttcaaccgaccggctgtttgtgtgaagtgattcacatccgccgtgtcgatggaggcgcattatagggatcccatttttttgcacaagcgttttttggatctttttttctgtttgttgatttttcatccctttcgctccattcctgcgcaaagtggcgattttttgatgctatctccccttgcacaacgccgttaaagcaaccaaagtcttcatgactattcatttatgatgaggtagacatgtctgacacattacgtccttataaggatctttttcctgaaatcggtcagcgcgtgatgatcgataccagcagcgtggttattggtgatgtccgtctggcggatgatatcgggatctggccgcttgtggtgattcgcggcgatgtgaattacgttgcgataggggctcgtacgaacattcaggatggcagcgttcttcacgtaacccacaagtcttcatccaatccacacggcaacccattaatcattggcgaagatgttaccgttggccataaagttatgctgcacggctgtaccatcggtaaccgcgtactggtcggtatgggctccattgtgttggatggcgcgataatagaagatgacgtaatgattggcgcgggaagcctggtgccgcagcacaaacggctggaaagcggctatttatatcttggcagtccggtaaaacagatccgccccttgagcgatgctgagagatcgggcctgcagtactccgccaataactatgtaaagtggaaagacgactatctttctcaggataaccatatccaaccgtgatcatcttcctgctgggccaggattaatgcttccgcctcttcttccaggtcccagcgatactcacgaaaaatggccagccattgctccgctgtttctccaccaaagcgatacgccagtacatctttttttattgcacacgtgagttgcatcccattaaccagggcgggaaagatgatagcactggcggcagtatcccattcttcgcggtcaggaaattgtatggcctggttcacgctaataattcctgctgtagcagctcaatcactggctcgacctgcggtaatacaccgtgccaaagcaaaacggcatgtgcagcctgccccaccagcattcccagcccatctgcgtagcgttttgcgccctgttgtacacaccaggagagaaatggcgtattccctttttgatagaacatgtcatagcaacagagggaagggtgaataagtgacgccggaatcgccgggatttcgccccgtatgccgctggaggtcgcattaataatcaggtcaaactcacaaccatccagcttgtccatatccgtggcatgaacgctgccggtatgagcaaagattttcgccaacgcttcggcacgtgaagctgtacggttagtgatagtgaccgcgcaatccaaagaaagcaggggtaacagcacgccccgggatgcgccgcccgcgccaatcagcaaaatacgcaatcctgggcggataaaatttaaacgttcgagatcgcttaataaaccgataccgtcagtattgtcgccaagcaaacgaccatcttccagccgttttaatgtattgacggctcccgccagcgatgctcgttccgttaactcatccgaacgcgcaaacgcctcctctttaaaaggtactgtgatgtttgcgccttttccccctgccgcgaaaaaggcatcaagcgtattaatgaaattattaataggggccagcacgcgaccataggggtgaacaatatctagctgctgagcaaattgctgatgaataaatggcgatttgctgtgcgcaatcggatttccaaaaacagcataggtttccatcatattacccctgtcgaaacagttcgcccgtcagagcatcgcgaatttctgaaggatttaaacgcccacccgttgcgccttcaaccaccggaaaatcatcgccaaattgcgcacgcacctcttcaatggtacgacatggcggtaatccgctcagattggcgctggtggaaaccagcggtttgccatacgcattgcatagcgcgaccaccagcgggtggttggtaacacgaacggccagggaatcaaaacgtcccgtgagccaccgcggcgttgtcgcgggcgcaggaaaaacaaacgttaccggcccgggccagcaatcaaataccgctttacgctgtgcggcggtaagtatgctgtcatcaatataaggttttaactgctcaaagctggcggcaatcaaaatgagtcccttatcgacgggccgttgttttaacgccagcaggcgcgtaacggctgtttcactatcgggatcgcagccgacgccgaaaacggcttctgttggataagcgatgacattttctttattcaggagatctaccgctgcggcgatagatcctgttggcaggctattattcacttgtttattccaccggaaccggctttccacattgtttactggcgcaaaagcgcttcacgccctgcgcggttttcttttcgatgagtagcggataatggcactcggggcattcccccgcaaccggtgtgaagttaatgacgaactgacattccgggtagcgatcgcaggaatgaaagattttaccgtaacgagaacggcgctggaccaaatgtccttgctggcaggctggacaggcaatcgccgtttcatccggtttatcaataaccactgtatgttcacattgcggatactgactgcatccgatgaacatgccaaagcgcccctgacgcagcaccagcacggcgccacactcagggcacggttgcccctccagaattttaacgatatgtccgtccgcctgacttttcagcggacgaacgtaatcgcattccggatagcgagaacagccgagaaacggaccatgtttcccggagcgaattaccagttcggccccgcactgcgggcagggctcatttttacgcaccgaaaacagtgctgatttagccatattcactcatgcagcattaacacctatcaatgcagcataccttcatttacctcaaagagtaattcttccatttgctgataggcgttttcacagcccggaatgttgaataacaccatcaaaataacccatttcaagtcttccaggtcaaactctgcggtatccagcgccagcacacgctcaatcaccatttctcgtgtttcgaggtttagcacctgaatctgctcaaggaataacaggaacccccggcaactggcatcaagcctttcacactcttcaaccgtataaatgcgcattgaaagaggatcggaagcaagttgcatgggttccgcgaggccatcctgatagtcagcgagtttttccagccacagcagcgcattgtagatgtcttcgcgatcaaacccagcgtcggtgagatcacgctccagtctgtcctgatccacgcgcagctcggcttcgttatggatgtatgtttcaaacaaatacattagtacgtcgaacatggcttgccctccttaatcggacatagccgccgggtacagctgcgatccatcctgctaactccagttcgagtagctgagccactaccgctggcacaggttggccggcacgttcagcgacgacgtcaacaggtgttacctcatctcctacgttagccaggagctcaggaaatggcaatgccgcctcatcctgatttagtgaataaagtgaattttccgccgtagttggcaaccagtgtaagccgtattgcaaattttccagaatatcctccggcgtcgtcacaagcgtggccccttgtttaattaaccagtgcgtgccttcgcttcccggactaccgataggacctggtaatgcaaaaacgtcccgcccctgttcaagcgcgcagcgcgccgtcaccaacgaaccgctgcgcaacgccgcctcaatcaccagcacgcctttgctcagtccgctgatgatacggtttctgcgaggaaaattttgcggtagcggaggcgttgaaagcggaaattctgagaccactgcgccgccggtagcaatcaagttttcagccagcatggcatgtcggcgaggataaatctttgccaagccattccctaacaccgctacactttttccccccatactcaccgcggcgttgtgtgctacgccatcaattccccgggcaaggccgctggtgatcgtcaaaccgcttttcgcaaggctttcgcaaagcagacgtccccagcgttctccataccaggagtggctccggctccctacgacggcaagttggcaggtatgcagacaggcaggatcgccgtcaataaaaatagcgccgggataatcatcaatagcacgcagttggggaggataaatctcactatccgcacacagaaaatgatgctgcggtagttcaagccagcgtaacgtctcatcaagcacacctgctggaagctgtaaaaaacgttcagcttgccgcgcggtaagaccagcctcctgaaggtgcgtgcgatttatctgaggctgacgaataagcgagttcgccatgttcaacatcgcctcgccataaaggtcgccgacgtacattaaacgtaaccaaatttcggtacgggccatcctttccctcccctgccacaagcagtctgaacaatctttgcgattggtcactgatgctgtcaatcaggtggggatttgtctagaatagaggtaataatcttttcaactcctgaacacaactctggataattatgtcagttttgcaagtgttacatattccggacgagcgccttcgcaaagtcgcaaagccggttgaagaagtgaatgcagaaattcagcgtatcgtcgatgatatgttcgaaacgatgtacgcggaagaaggtatcggtctggccgcaacgcaggtcgatatccaccagcggatcatcgtgattgacgtttcggaaaaccgcgacgagcgcctggtactcattaacccggaattgctggagaaaagtggcgaaacgggtatagaagaaggctgtctgtcgattccggaacagcgcgctttagtgccgcgcgccgagaaagtgaaaatccgcgcgctggatcgcgacggcaacccgtttgagcttgaagcggatggtttgctggcaatttgcattcagcatgagatggatcatctggtcggtaaactgtttatcgattatttgtcgccgctgaagcaacaacgtattcgtcagaaagtagaaaaactcgaccgcctgaacgcccgggcttaaaggacaagaaccaacgtgtcagattcactacgtattatttttgcgggtacacctgactttgcagcgcgtcatctcgacgcgctgttaacttctggacataacgttgtcggcgtatttacccaacccgatcgtccagcaggtcgcggcaaaaagttgatgcccagcccggtaaaagtgctggcggaagaaaaaggcctgcccgttttccagcccgtgtcgcttcgtcctcaggaaaaccagcaactggttgctgacttacatgccgacgtcatggttgtcgtagcatatggtctgattctcccaaaggcagtgctggatatgccccgtctcggatgtatcaacgttcacggttcgctgcttccacgctggcgcggcgcggcgcctattcagcgctcactctgggcaggcgatgcggaaaccggcgtcacaattatgcagatggatgtagggctggataccggcgacatgctgtataaacttgcgtgcccgattaccgcagaagataccagtggctcactgtataataagttggctgagcttggcccgcaggggttaattaccacactaaaacaactggcggacggcacagcggcgcctgaagcgcagaatgaagcgctggtcactcatgcggaaaagctcagtaaagaagaagcgcgtatcgactggtctctctccgcagtacagctggagcgttgcattcgcgcctttaatccgtggccaatgagctggctggaaatcgacggccagccggtaaaagtctggcaggcgtccgtcattgaggacgccacgcagtcgctgccgggaaccattctggccgcgacgaaacagggcattcaggttgcaacaggcaaggggatattaaatttgctttcgcttcagcctgccggcaaaaaagcaatgagcgcccaggatctgttaaattcacgccgggaatggtttattcctggtaaccgtcttgcctgacggtcacgtctttataagcccggtgttaccgggcatttttattttatacatatgaaaaaacaaaacaatttacgtagtctggcagcacaggccgttgaactggtcgtcgaacagggacaatcattaagtaatgtgctcccgccgctgcaacaaaaagtcgccgataaagacaaagcgctacttcaggagctgtgctttggcgtcctgcgcaccctttcacagctggaatggctgatcaataagctgatgtctcgtccaatgaccggcaagcagcgtacagtgcattacttaattatggtcggcttttatcagttgctgtacacccgcgttcctccccatgcggcgctggctgaaaccgttgaaggcgcggtcgccatcaaacgtccgcagttgaaagggttaattaacggcgtcctgcgccagtttcagcgccagcaggaaacgttgcttaatgagtttgcgaccagcgatgcgcgctttttacatccaggttggctggtaaagcgtttgcaaaatgcttaccccacacagtggcaacacattattgaagcgaataaccaacgtccaccgatgtggctacgtgtaaatcgtacacaccacacccgcgacggttggcttggcttacttgaagacgcaggcatgaagggatatccccatcccgattatcccgacgctgtacgtctggaaacgccagctccggtacatgctttacccggttttgctgagggttgggtaactgtccaggatgcctctgcgcagggatgtgcggtttttctcgctcctcagaacggtgagcacattttagacttgtgcgccgcgcccggcggtaaaaccacgcatattctcgaagtggcccccgaagcagacgtgttggcggttgatattgatgaacaacgactctcccgcgtttacgacaacctaaagcgtcttgggatgaaagcgacagttaaacaaggggatggacgttatcccgcccaatggtgcggcgagcagcagtttgaccgtattctgctggatgcgccctgctccgcaaccggcgtcattcgccgtcatccagatatcaaatggctgcgtcgcgatcgcgatatcgcggaactggcgcaattacaggcggaaattcttgatgccgtctggccgcgcctgaagcctggcgggacgctggtttacgccacctgttccgtactgccggaagaaaaccgcgatcagatcaaaacctttttgcaacgcactcccgatgccgcgctcagcgaaacgggaacacctgatcagccaggacagcaaaatctgccgggcggcgaagaaggtgatgggttcttttacgctaagctaatcaagaagtgatgagataacgggccacgactgatgaaaattatcatactgggcgcagggcaagttggcggaacactggcggaaaacctggtcggcgaaaacaacgacatcacggtggttgataccaacggcgaacggttacgcagtttgcaagataagttcgatctacgcgtagttcaggggcatggttcgcatccccgcgtgttgcgcgaagcgggcgctgacgatgcggatatgctggtcgctgtcaccagttcagatgaaactaatatggttgcctgtcaggtagcctattcactcttcaacactccaaaccgtatcgcccgcattcgctccccggactatgttcgcgatgcggataaactctttcattctgaagcggttccgattgatcatctgatcgcgccggagcagttggttatcgataatatttatcgtctgatcgagtatccgggagcattacaggttgtaaactttgctgaagggaaagtcagtctggcagtagtaaaagcctactatggcggtccactaataggtaacgcgctctcgacaatgcgagaacatatgccgcatatcgatactcgcgttgccgcaattttccgccatgacagaccaatccgtcctcagggctcgactatcgtggaagcaggggatgaagtcttctttattgcggcttcacagcatatccgtgcagtaatgagcgaattacagcgtctggaaaaaccctacaagcgcatcatgctggtgggcggcggcaatatcggcgccgggctggcaaggcgtctggaaaaagactatagcgttaaattgatcgaacgcgatcaacaacgcgccgcagaactggctgagaaactgcaaaacacgatcgtcttttttggcgacgcctccgatcaggaattgctggcggaggagcatattgatcaggtcgatctctttatcgcggtcactaacgatgatgaagccaatatcatgtccgcgatgttggccaagcggatgggcgccaaaaaagtgatggtgttgattcagcgtcgagcttatgtcgatcttgtgcagggtagcgttatagatattgcgatttctccgcagcaggccaccatctctgcattactgagccatgtgcgtaaagcggatatcgtcggcgtttcctcactacgtcgcggagttgccgaagccatcgaagccgtcgcgcacggcgatgaaagcacttcccgcgtggttggccgcgtcattgacgaaataaaactgccgccaggcaccattattggcgcggtcgttcgtggtaatgatgtcatgattgctaatgacaatttgcgcattgaacaaggcgatcacgtcattatgtttttgaccgataaaaagtttattaccgacgtcgaacgtctgttccagccaagtcctttcttcctctaatttaaggggcgctcattcagcgccctttttaattccctttatttatcaaggtttaatttatttcgctaaacagaagccgtaaatggaaaatgccttagcatttgttaaacttataacgtcagctgcatagggagaataaaaatgagttttattaaagaatttcgcgaattcgcgatgcgcgggaatgttgtggatttggcagtgggtgtcattattggcgcggcattcggtaagattgtttcttcactggttgccgatatcattatgccgccgttgggattgttaatcggcgggatcgactttaaacaatttgcttttacgttacgcgaagcgcagggagatattccggcggtcgtcatgcattacggcgtgtttatccagaacgtatttgattttgtgattgtggcctttgctatctttgttgccattaagcttatcaacagactcaaccgtaaaaaagcagaagagccggcagctccgccagcgccttctaaagaggaagtgctattgggcgaaatccgcgatctgctgaaagaacaaaataaccgttcttaataagcagaaggccagtggtaaaaaagttacttactttcttgccactggcctcccagttccctcgattaccgtgtttacctttgcgcagatagcttcctttgcctttcttatttttttcaacgcgttgcctgaaaaggggatcgtgcagtaatgcctcaatggcattgtcctttatctgccctttcttatgttgataacgactcataatgtctcccgattgtataaattaacggctcgagtgtagccccgccggttcaataaatcaacatcctgatttcgctccactggccccctgttccagggcttccagaatggaacaatagacgctactgtgggccgttccgcaacaagcatcattaagcctttgtaacgaacgctgcatcgtttgcagttccgcaatcctggcttcaacctcctgcaatcgctcttgcacaatactttttgactcctgacaggtatggtgctcaggatcaattcggatcgataaaagctcgcggatcgagtcgagcgtgaaacccaactgtcgcgcataacgaataaacttgagacgctgcagatcggtttcggtatacagacgaaacccgccttcagtacgtacctcatgatccatcatctgctgtttttcatagtagcgaatggtatcaggcgttacgtctgccagctttgccagctcaccaatgcgatacatacaagctccgttaattatcgttgattttatgcagcagtttttctgcatactcaccgtgtaaaaagtcggtactcaacccagcctgccgaagttttagttcaagcagggagagctggcgactaacctgatggtatcgagggtcatcttcccggatactgttgaggatatcaagtaactgaatagcgtctctgcgctgctccagttcagggggaagacagcccgcattcttgagtaagcgataacccgcacgaagttccgccggcacatgagaatcatcatccagaataagcggctcgccacggccaggcaaattatcaaactcgcctttacgctgtgcctcgataatatgacgctctgcccactggtcaagtaaccacatacgtcgctccagggattgaacgaaaagaatacaattattgtagatatgtggggttcaggaggatataaaaaaacccgccgaagcgggtttttttacgttactacagattactctgcagcagcttctgttttctctgaacgatcaaccagctcgatgtatgccatcggcgcgttgtcgcctgcacggaagccacacttcagaatgcgagtgtaaccaccggcgcggctcgcgaaacgcgggcccagctcgttaaacagttttgccacgatctcgttatcacgagtacgggcgaatgccagacgacgattagcaacgctatcagtcttggcaagagtaatcagcggctcaactacgcgacgcagctctttcgctttaggcagggtcgtcttgatgatttcatgacgaaccagtgaacctgccatgttgcggaacatagcctggcgatggctgctgttgcggttcagttgacgaccactcttacgatggcgcatgaccttatccttctcagtaaaaccttaacctgtgatccggttactcgtcagcgatgcttgccggtggccagttttctaggcgcatacccagagacagtccacgggaagccagcacgtctttaatctcggtaagagattttttacccaggttaggcgtcttaagaagctcaacctcggtacgctgtaccagatcaccgatatagtggatagcttctgccttgaggcagttagcagagcggacagtcaattccagatcgtcaacagggcgcagcaggatcggatcgaattctggtttctcttctttcacttccggttgacgtacatcacgtaaatcaacgaaagcttccagttgttcagccaggatggttgccgcacgacgaatcgcctcttcaggatcgattgtgccgttggtttccatttcgatgaccagcttgtccaggtcggtacgctgttctacacgcgctgcttcaacattgtaggcaatacgctctacagggctgtagcaggcgtcgaccagcagacggccgattgggcgctcatcttcttccgaatgaattcgggtagaagccggcacataaccacgaccgcgctgaactttgatacgcatactaatagacgcgttttcatcggtcaggtggcagatcacgtgctgcggcttgacgatttcgacatccccatcatgggtgatatcggctgcagtcacagggccaatgccagatttattcaaggtaagaataacttcatctttaccctgaactctcaccgccagccctttcaggttgagcaggatttccaggatgtcttcctgaacgccttctttggtgctgtactcatgtagtacaccatcaatctcaacctcggtcaccgcgcaacccggcatcgatgagagcagaatacggcgcagtgcgttacccagagtatggccgaagccacgctctaaaggctcaagggtcaccttggcgtgcgtcgaactcacttgctcgatatctaccaggcgcggttttagaaactctgtcacagaaccctgcattgtgtcctctctttggtactaagctttacttggagtaaagctcgacgatcaggtgttcgttaatgtccgcagacagatcagaacgctcaggcttacgcttgtacgtaccttccatcttgccagcatcaacttccagccaggttggcttttcacgctgctcagccagctccagagcggctttcacgcgagactgcttcttcgctttctcacgaatgctaacaacgtcattcggactaacctgataagaagcgatgttaacaacacgaccgtttaccataattgctttatggctaaccagctgacgtgcttctgcacgagtggcgccgaagcccatacggtatacaacgttgtccagacgaccttccagcagagccaacaggttttcaccggtgttgcctttcagacgtgctgcttctttgtagtagttacggaactgacgctccagcacaccgtaaatgcggcgaactttttgcttttcacgcaactgcacaccatagtcagacagacgcggcttacgcgcaccgtgctggccaggagcttgttcaattttacacttggtatcgatcgcgcgaacgccagacttaaggaataagtcggtgccctcacgacggctcagcttgagcttaggacccaaatatcttgccattttctttctccaactaacctggaaaacgaagcgttatacgcgacgttttttcggcggacgacaaccgttatgagggatcggagtcacatcagtaatattagtgatgcggaaaccagcggcgttcagagcacgaatagtagattcgcggcctggacccggacctttaaccataacttccagattcttgataccgtattctttcacggcgtcagcgcaacgctctgctgcaacctgagctgcaaacggagtggatttgcgagaaccacggaaaccggaaccaccggctgttgcccaacccagcgcattaccctgacgatcggtaatagtcacgatggtgttgttgaaagaagcatggatatgagccacgccgtcagagacttgttttcttacacgtttacgtgcgcgaactggtgcctttgccattattcaatcaccccgattatttcttgatcggtttgcgcggacccttacgggtacgagcgttggtcttggtacgctgaccgcgaaccgggagaccacgacgatgacgcaaaccgcgatagcaaccaagatccatcaggcgcttgatgctcatgctgatttcacggcgcagatcaccttcaacgacaaatttggcaacttcgtcacgcagcgtgtcgatttgttcttcagacagctcactgatcttaacattttcagcgatacccgctgcagccaggatggctttagaacgggtcttgccgacaccgtagatcgaagttaacgcgatcacggcgtgtttctgatcaggaatgttaatgcctgctatacgggccactatgcactcctactatttaatatgtacgtaccatgctgaaaagcccgttttcaggatactcaaatggaaacgtacagacatacaaaagattggctggctaatctagccagctcaacccaactttgcaagaaaaatatgcgaaaaaatcagccttggcgctgtttatgcttcggctcggcactgcaaatcacacggatgacaccatcacgcttaacgattttgcagttacggcataatttcttgacggaagcacgaactttcatttttactctccgtaacttctcaggcgaccaattaacggccgtagcctttcaggttcgccttcttcaatgcagactcatactgactggacatcatcagagtttgcacttgagccataaagtccataatcacgacaacaacgataagcagtgaggtcccaccgaagtagaacggcactttcattgcatcacgcatgaactccgggatcaggcagataaaggtaatatacagcgcaccaaccaaggtcaggcgggtcattactttatcgatatacttcgccgtttgctctcccggacgaattcctggtacaaatgcaccggacttcttcaggttatctgctgtttcacgcgggttgaaaaccaacgccgtgtagaagaaacagaagaagatgattgcagacgcatagagtaacacataaagcggttgcccaggctgcaaatacagcgaaattgttgtcagccagttccaaccagtaccgcccccgaaccatgacgcgatggtcgccgggaacagaataatactggaagcgaagattgccgggattacccccgccatattcactttcagcggtaaatgtgtgctctgtgcagcatagacacgacgaccttgctgacgtttggcgtagtttaccacaatacggcgttgaccacgttcaacgaatactacaaagaacgtcactgcaaatactaatactgcaaccaacagcaacacgaggaagtgcaggtcgccttgacgcgcttgctcgatagtatgggcaatggctggcgggagtcccgcaacgataccagcgaagatgatgattgagataccgttaccgataccgcgctcagtaatctgttcgccgagccacatcaggaacatcgtccctgtaaccagacttacaacagcggtgaaatagaatgcaaagcctggattcatcaccaggccctgcataccaggcatattcggcaaaccggtagcaataccgatcgactggaatatcgccagcaccagagtaccgtaacgggtgtactggctgatcttacgacgaccagactccccttctttcttaatttctgccagcgttggatgaaccaccgtcaacagctggataatgatcgacgccgaaatatacggcatgatccccagggcaaagatagaagcacggctgagagcaccaccagagaacatgttaaacatttcaatgatggtgcctcgctgttgctcaagcagtttggcaagtacagcggcatcaataccagggatcggaataaaagagccaatacggaacacaatcagcgcgccgataacaaacagcagtctgcgtttcagctcacctaagccacctttggcactttgaaaatctaatcccggttgtttagccatctgctacttattcctcgattttaccgccagcagcttcgatagcagcacgagcgcctttagtaacacgcaggccacgaacagttaccggagtagtgacttcgccagccaagatcactttcgcgaactcgatctggataccgataatgtttgccgctttcagcgtgttcaggtctacaacgccgccttctactttcgccaagtcagacagacgaacttcggctgtaatcgctgctttgcgagaagtgaagccgaatttcggcagacgacggtacagaggcatctgaccaccctcgaaaccgcgacgtacgccaccgccagaacgagacttctgacctttgtgaccacgaccaccggttttaccgaggccagaaccgataccacgacccaggcgtttacccgcctttttggagccttcggccggagacagagtatttaaacgcatctcttactcctcaactttaaccatgaaggaaaccgcgttgaccataccacgaacagcaggagtatcctcgcgctctacggtgtgaccaatacgacgcagacccaggccaagcagcgttgccttgtgtttcggcagacgaccgattgcactgcgggtttgagtaattttaatagtctttgccatggtttatttccccagaatttcttcaacggatttaccacgcttggcagcgaccatttctggagaattcatattttccaggccatcaatagttgcacgaaccacgttgatcgggttggtggaaccgtatgctttagccagaacgttatgaaccccagcaacttccagaacggcgcgcattgcaccaccggcgatgataccggtaccttcggaagctggctgcatgaatacacgagaccccgtgtgaacacctttaaccgggtgctgcagggtgccgttgttcagcgcgacgttaatcatattgcgacgggctttttccatcgctttctggatcgctgctggaacttcacgcgctttaccgtaaccaaaacctacgcgaccgttaccatcgcctactacagtcagagctgtgaaggagaaaatacgaccacctttaacggttttagatacgcggtttaccgcgatcagcttttcctgcagttcgccagcttgtttttcgatgtgagccatcttacacctctaccttagaactgaaggccagcttcacgggcagcatctgccagtgcctggacacgaccatgatattggaacccggaacggtcaaaggacacatctttgatgcctttttccagagcgcgttcagcgacagctttacccacagctgcagccgcgtctttgttaccggtgtacttcagttgttcagcgatagctttttctacagtagaagcagctaccagaacttcagaaccgttcggtgcaattacctgtgcgtaaatatgacgcggggtacgatgtaccaccaggcgagttgcgcccagctctttgagcttgcggcgtgcgcgggtcgcacgacggatacgagcagatttcttatccatagtgttaccttacttcttcttagcctctttggtacgcacgacttcgtcggcgtaacgaacacccttgcctttgtaaggctcaggacgacggtaggcgcgcagatctgctgcaacctggccgatcacctgcttatcagcgcctttcagcacgatttcagtttgagtcggacattcagcagtaatacctgccggcagctgatggtcaaccgggtgagagaaacctaaagacaggtttactacattccccttaaccgctgcacgataacctacaccaaccagctgcagcttcttagtgaagccttcggtaacaccgataaccattgagttcagcagggcacgcgcggtaccagcctgtgcccaaccgtctgcgtaaccatcacgcggaccgaaggtcagtgcattatctgcatgtttaacttcaacagcatcgttgagagtacgagtcagctcgccgtttttacctttgatcgtaataacctgaccgttgattttgacatcaacgccggcaggaacaacgaccggtgctttagcaacacgagacattttttcctccgattaggctacgtagcagataatttcgccaccaagaccagcctggcgcgctgcacgatcagtcataacacctttagaggtagaaacaactgcgatacccagaccggccataactttcggcagctcatctttacgtttgtagatgcgcagacctgggcggctgacacgctgaatgctttctacaacagctttaccctggaaatacttaagagtcagttccagttccggcttggtgtcgccttcaactttaaaatcttcaataaaaccttcttccttcagcacgttggcaattgccactttcagcttggaggaaggcatggtgaccgcagctttgttcgcggcctgaccgttacggatacgggtcagcatatccgcgatcggatcttgcatgctcatctgtctttactcccgtgattcaattggtgacaattaccagctagcctttttcagacccggaatttcaccgcgcatagcggcttcacggaccttaatacggctcaacccgaacttccgcaggaaagcgtgcggacgaccagtttgacggcagcggttacgctgacgtgacgggctggaatcacgcggcagagtctgcagcttaagaaccgcattccaacgatcttcgtcggttgcgttcacatcagagatgatcgctttcagttcagcgcgtttcgcgaagtatttatcagctaaagctacgcgttttacttcgcgtgctttcattgattgcttagccatttagtaaccctaccttacttgcggaacgggaagtcaaaggcagccagcagagcacggccttcttcgtcagatttcgcagtagtggtaatggtaatatccaaaccacgaacgcggtcgactttatcgtagtcgatttctgggaagatgatctgctcacggacacccatgctgtagttaccacgaccgtcgaatgacttagcggacaagccacggaagtcacggatacgaggaacagcaatagtgatcaggcgctcaaagaactcccacatgcgttcgccacgcagagttactttacagccgatcggatagccctgacggattttgaagcctgcaacagatttgcgtgctttggtgatcaacggtttttgaccggagattgctgtcaggtctgctgctgcgttatccagcagtttcttgtcagcgatcgcttcaccaacacccatgttcagggtgatcttctcgacccgagggacttgcatgacagaattgtagttaaactcagtcatgagtttgttaactacttcgtctttgtagtaatcatgcagtttcgccatcgtactactccaaattacttgatagtttcgctgttagacttgaagaaacggacttttttgccgtcttcgaatctaaagcctacacggtcagccttgccggttgccgcattgaagattgcaacgttagaaacctgaattgcagcttctttttcaacgatgccgcccggttggttcagagccggaaccggcttctggtgtttcttaaccaggttgataccttcaacaatgaccttgccggaagacaggacattcttaactttaccgcgtttacctttatctttaccggttaacacgataacttcgtcatcacgacggattttcgctgccatgattcgctccttagagtacttctggtgccagagagataattttcatgaacttctcgttacgaagttcacgagttaccggcccaaaaatacgcgtaccgataggctgctcgctgttattgtttaaaataacgcatgcattaccatcgaagcgaatgacagaaccgtccgggcgacgaacacccttcttggtgcgcaccactaccgccttcagcacatcaccttttttgaccttaccacgcggaatcgcttctttgatggtgatcttaatgatgtcgcctacgcctgcgtagcgacggtgcgagccacccagaaccttgatacacattacgcgacgtgcaccggagttgtcggcgacgttcagcatagtctgttcttggatcattttagtgctccgctaatgtcaactactactgagacccgaaaatcaggtcgttaaaaaaaccccatatcgagggcgcggcattataacaccgcaaatcagatatgggtagaaaaaataaacggcccatcgctgagccgtttattcgttgagaatgcgtactgtattacagaaccgctttctctacaacgcgaaccagagtccaggatttagtcttggacagcggacggcattcgcggatttcaaccacgtcgccgataccgcattcgttgttctcgtcatgtacgtgcattttggtcgtacgcttgatgaatttaccgtagatcgggtgtttcacaaaacgttcgatagcaacaacaatggatttctccattttgtcgctaaccacgcgaccttgcagagtacggattttatcggtcattacgcacccgccttctcagtcagtaaagtcttaacgcgtgcgacatcacgacgcacttgcttcaacaggtgagactgttgcagctggccacttgcagcctgcatacgcaggttgaactgctcacgcagcaggttcagtagctcggtgttcagctcttcaacgctcttctcacgcagctcttttgctttcattacatcaccgtcttagttacaaaggtggttttaatcggcagtttcgctgctgccagcttgaatgcttcacgggccagctcttccggtacgccgtccatttcatacaggactttacccggctgaatcaaggcaacccaatactccacgttacctttacctttacccatacgcactgccagcggcttttcagtgatcggtttgtccgggaatacacggatccagatcttaccttgacgcttaactgcacgggtcatagcacgacgtgctgcttcgatctgacgggcagtcagacgaccacggccaacagctttcaggccgaagctgccgaagctaacatccgcgcctgcagccagaccacggttgcggcctttgtgcattttacggaattttgtacgctttggttgtaacatcagcgacgctccttatttacggcctttacgctgctgctttttcggttgagcagccggtttttccggttgttcaacagcagccataccacccaggatctcgcctttgaagatccacactttaacgccgattacaccataagtggtgtgcgcttcagaggtgttgtagtcgatgtcagcacgcagagtgtgcagaggtacgcgaccttcgcggtaccattcggtacgtgcgatttccgcgccgcccagacggccgctaacttcaactttgatacctttagcgcccagacgcatggcgttctgtacagcacgcttcatcgcacgacggaacatcacgcgacgttccagctgagaagtgatgctgtcagcaaccagtttagcgtccagttcaggtttacgaacttcggcgatattgatctgtgcaggaacgccagcgatatccgctacgaccttacgcagtttttctacgtcttcaccttttttaccgataacgatacccgggcgagcggtgtgaatagtcacacggatgctcttagccggacgctcgataacgatacgagatacagacgctttagccagttccttcgtcaggtactgacgtactttaaaatcgctgtccaggttgtcagcgaattctttggtgttcgcaaaccaggtagagttccatggttttacaatacccaggcgaataccattaggatgtactttctgacccattgctagtctccagagtctcagcgatcggacacaaccacagtgatgtggctggtgcgcttcaggatgcgatctgcacgaccttttgcacgcggcataatgcgcttcatgctcgggccttcgtctacgaaaattttcgtaactttcagatcgtcaatgtcagcgccatcgttgtgttcagcgttagcaatggcagattccagaactttcttgaccagtacagccgctttcttgttggtgtaggtcagaatatccagagcctgcgacactttcttaccgcgaatcaggtcagcaacaaggcgaaccttctgagcagaagaacgagcatggcgatgtttagcgatagtttccatctcttcctcctaccttatttcttcttcgcttttttatcagcagcgtggccgcgataagtacgagtcggtgcgaattcacccagtttgtgaccgaccatttcgtcggaaacaaataccggaacgtgctgacgaccattatggacagcgatggtcaaaccgatcatgttaggaaagatcgttgaacgacgggaccaggtgcgcaggggcttcttgtctccgctttccaccgctttctctaccttcttcagcaagtgcaggtcaataaaaggacctttcttgagagaacgtggcatggcttatcctctaaaattatttgctacggcgacgtacgatgaatttatcagtacgcttgttgctgcgggtcttcttacctttggtctgaacgccccacggagttaccgggtgcttaccaaagttacgaccttcaccaccaccatgtgggtggtctactgggttcatcgcagtaccgcgaacggtaggacgaacgccacgccagcgtgcagcacctgctttacccagaacgcgcagcatatgctcagcattgccaacttcgcccagggttgcacggcagtctgcttcgactttacgcatttcaccagaacgcagacgcagggtgacataagcgccatcgcgagcaacgatctgaacgtaagtaccagcggaacgcgccagctgaccgcctttacctggtttcatttctacgttatgaacggtagaaccaaccgggatattgcgcatcggcagggtgttgcctgctttgattgcagcatcaacgccagactgaatctggtcgccagctttcaggcctttcggggccaggatgtaacggcgttcgccgtctttgtacagaaccagcgcgatgttcgcggaacggttcggatcgtactcaagacgttcaacaactgccggaataccgtctttgttgcgtttgaagtcaacaatacgataagcctgtttgtgaccaccaccgatatgacgagtggtgatacggccattgttgttacgaccaccggatttgctgtttttttcaaccagcggagcaaaaggtttgcccttgtgcagctctgggttgaccactttaacgacgtggcgacgacccggagatgtcggtttacatttaacaactgccattgtattactcctccgacttactcagcgccaccgacgaagtccagattctggccttctttcagggtgacgtaagcttttttccagtcgctacgacgaccgatacgctgtccgtgacgtttaactttccctttaacgaccagggtgttaacgacttcgacttcgacttcaaacagtttctgcacagcagctttgatttctgctttggtcgcgtctttagcaactttgagaacgatggtgttagttttttccatcgcagtagacgctttttcagaaacgtgcggtgcgcgcagcaccttcagcagacgttcttcacgaatcatgccagcatctcctcaacttgcttaacagcatcagcagtcattacgactttgtcgaaggcgatcaggctaaccgggtcgataccagtcgcatcgcgtacgtcaaccttgtgcaggttacgtgcggccaggaacaggttctcgtccagctcaccggtgatgatcagcacatcttccagagccatgtctttcagtttctgtgccagcagcttagttttcggcgcttctacagaaaacttctcgacaacgatcagacgatcctgacgtaccagttcggacaggatgcttttcagcgcgccgcggtacatcttcttgttaactttttgactgtggtcctgcggacgagcagcgaaggtcacgccaccggaacgccagatcgggctcttgatagaacctgaacgcgcacggccagtgcctttctggcgccacggttttttaccggaaccagttacttcagcacgagtcttctgagcacgagtaccctgacgagcaccagctgcataagcaacaacaacctggtgaaccagcgcttcgttgaaatcacgaccgaaggtagtttcggaaacagtcagcgcgctctgcgcgtctttcaatactaattccattgctatccccttacgccttcacagctggtttaacgatcaggtcgcaaccggttgcacccggaacaccacccttaaccagcagcaggttgcgctcagcgtcaacgcgtactacgtcaaggctctgaacggttacgcgctcattacccatctgacctgccattttcttgcctttgaacactttgcccggagtctggttctgaccgatagaacccggaacgcggtgagacaaggagttaccgtgagtagcgtcctgggtacggaagttccagcgcttaacggtaccagcgaaacctttacctttagaggtaccggttacgtcaacttttttaacgtcagcaaacagttcaacgctgatgctctgacctacggtgtattcttcgccttcagccagacggaattcccacagaccacggccagcttctacgccagctttagcaaagtgacccgcttccggcttggtgacacggttagcttttttagcacccgtagtaacctgaacagcgcggtagccatcgttagccaggtctttaacctgagtaacacggtttgcttcaacttcgattacggttactgggatagagacgccatcttcagtgaagatgcgggtcatacccacttttttaccgactaaaccaatcattgtatcaacctctcaatcgctcgatgacctgattaacccaggctgatctgcacgtctacaccggcagccaggtccagacgcatcagagcatcaacggttttctcggttggctcaacgatgtcaaccagacgcttgtgagtgcgaatttcgtactgatcgcgcgcatctttgttaacgtgcggagagatcagaacggtaaagcgctctttgcgggtcggcagcgggatcggaccgcgaacctgcgcaccagtgcgcttggcagtctcgacgatttccgcggttgattgatcgatcagacgatgatcaaacgctttcaggcggatacggattctttggttctgcatgagaccagagctccaattattttataaacgaaaatgattactcctcacacccattacgattgatgggagagtgtaaccgttcttacgtagctccccgattgggagcattgttaaatagccaaatcggctattcgaggttcaaatcgaacctgccgtcaattacgacaagcccgcgcattatacgtaaatctcagcctgacgcaagtgtcggatagaaattaagcgctttattcttatgcgagcatgattccagatggtacgcatgggatggcaacgcgcaccttttctttggaaggcatcaggcaaacctggcaatacgtcgttgtcgctgtcgcataaatctataaagctgagcacaagccttgacgaggatttgcttatgtttgttgccctcccctttctcattttttatgcgtcgttctctttattacttggcatatacgacgcgcgtaccggtctgctgcctgaccggtttacctgtccattactgtggggtggtctgctttatcaccagatttgcctgccggagcgtttaccggatgcgctttggggtgctatcgccggctatggcggattcgcgttaatttactggggctatcgcctgcgttatcagaaagaggggcttggatatggcgacgtcaagtacctcgctgccttaggggcatggcattgttgggaaacactgccgttactggttttccttgccgctatgttggcctgtggcgggtttggcgtcgcgctactggtgagaggtaaatcggcattaataaacccgctaccttttgggccatggctggcggtggcgggtttcataacaggttggaaagttttctttccagacggttaatcggtaaccttaatttgtgattgcagataattttgcataccaagtttggcaatcaaatccagctcagtttccagccagtcgatgtggccttcctcgtcggcaagaatttcaatcatcatatcccggctaacatagtcatgaacgctatcggcataggctattgcctcacgtagatcttttgcgccttccagttcgagccggagatccgatcgtagcatctcttcgacatcttcaccgatgcccagcttgcccagatcctgtaggttcggtatgccttccagaaataaaatacgctcaatatacttatcggcgtgtttcatctcatcaatggattcatggtactcaacatcattaagccgggtcagcccccagtttttgaacatacgggcatgaagaaaatactgattaattgcgacaagctcatttcccaatagtttattgagataatttatgattttaacatcacctttcattttatagtccctccgcttccactctctagagcgtagatggggctacagggatgtcaaaaaaaagagtgtgactcaggcgatctctttaaattccggcatttgcgttaactcatcctgcatcacttctcgcgcggcgcgaatacacttaccacattgatttcccacaggaataaatttacgcaactgttgaaatgactgtggatgaaattgtcgtacagcctggcggatttttttatcgcttataccattacacaaacaaacgtacatgatcgctcccgttcaatttccgcacaaagtgtaaatgagaatggttatgattacaatagcacaaagcgatttacgccacgggagaagcgttaaaaagggtgaataaatataacagcggctaaatagcaggcaacaaaaagggcgccgaagcgccctcttcaattcaaaactaattaacgagtaattagcccagaactttagcaacaacgcccgcgccaacggtacggccgccttcacggattgcgaaacgcagaccgtcgtccatcgcgatcgggtggatcagggtaacaaccattttgatgttgtcgcccggcattaccatctctacgccttccggcagttcgatggtgccagtcacgtcagtagtacggaagtagaactgcggacggtagcctttgaagaacggagtatgacggccgccttcatctttggacagaatgtacacttcagattcgaacttggtgtgcggcttgatggtgcccggcttagccagtacctgaccacgttcgatttcttcacgtttgataccacgcagcagaacacctacgttctcaccggcacggccttcgtccagcagtttgcggaacatttcaacgccagtacaggtagacttctgagtctctttgataccaacgatttcaacttcttcgcccactttgatgataccgcgttctacacgaccggtaacaacggtaccacgaccggagatggagaatacgtcttcgatcggcagcaggaacggcttgtcaatcgcacgctctggttccgggatgtaagaatccaggaagccagccagttcgatgattttcgcttcccactctgcgtcgccttccagcgctttcagagcagaaccacgaacgatcggagtgtcgtcgcccgggaagtcgtactgagacagcagttcgcgaacttccatctcaaccagttccagcagctcttcgtcatcaaccatgtcgcatttgttcaggaacacgatgatgtacggaacgcctacctgacgacccagcaggatgtgctcacgggtctgcggcatcgggccgtcagtcgcagcaacaaccaggatcgcgccgtccatctgagcagcaccggtgatcatgtttttaacatagtcggcgtgccccgggcagtctacgtgtgcgtagtggcgggtcggggtatcgtattcaacgtgagaagtgttgatggtgataccacgcgctttttcttccggcgcgttatcgatctggtcgaatgcacgagcagcaccgccgtaggttttagccagtacggtggtgattgcagcggtcagggtagttttaccgtggtcaacgtggccgatggtgccgacgttaacgtgcggttttgtacgttcaaatttttctttagacacggctatattccttactatagcgctctccccttcaggagagagcacgggattttggtttttaaccctgcggcttatttaccacgggcttcgattacggcctgagcaacgttgttcggcgcatcatcatacttcaggaattccatagtgtacgatgcgcgacctttggtcagagaacgcagctgagttgcatatccgaacatttcagacagcggtacttcagcgtggatcttaacgcctgtaacttcagattcctgacctttgagcataccacgacggcggctaaggtcgccgataacgtcaccggtattctcttcaggtgtttctacttcaaccttcatgatcggctcaagcagaactggttttgctttcttaaagccttctttaaaggcgatagacgcagccagtttaaacgccagctcagaggagtcaacgtcatggtaagaaccgaagtgcagacgcacaccgagatcaactaccggataacccgccagcgggccagatttcagctgctcctggatgcctttatcaacggccgggatgtattcgccaggaattacaccacctttgatgtcgttgatgaactcgtaacctttcgggttagagcccggctccagcgggtacatgtcgataacaacatgaccatactgaccgcgaccaccagactgtttcgcgtgtttaccttcgatgtcggtaactttcgcgcgaatcgcttcgcggtaagcaacctgaggtttacccacgttagcttcaacgttgaattcacgcttcatacggtcaacgatgatatccaggtgaagttcacccataccagcgatgatggtctggttagattcttcatcagtccatacgcggaatgacgggtcttctttcgccagacggcccagagccagacccattttttcctggtcagctttggttttcggttctaccgcgatggagattaccggctcagggaattccatacgttccagaatgatcgggttttccggatcacacagggtgtcaccggtagtcacgtctttcaggccgatagcagccgcgatgtcgcccgcgcgaacttctttgatctcttcacgtttgttggcgtgcatctgaacgatacgaccgaaacgctcacgtgcggttttcacggagttcagtacggtatcaccagagttaaccacaccggagtacacacggaagaaggtcaggttacccacaaacgggtcggtagcgattttgaacgccagcgcagagaacggctcgtcgtcgcttgcgtgacgctcagccggagtatctttaccgtcgtccagaataccgttgatcgcaggtacgtctaccggggatggcaggtaatcaattaccgcatccagcatcgcctgaacacctttgttcttgaatgcagaaccacaggttaccaggatgatttcgttgttcagaacgcgctgacgcagagcttgtttgatctcttcttcagtcagttcttcaccacccaggtatttttccatcagctcttcagaagcttctgcggcggactcgatcaggttctggtgccattcgttagccaggtcctgcatgtcagccgggatatcttcgtattcgaaggtaacgccctggtcggcatcgttccagttgatggctttcattttcaccaggtcaacaacgccggtgaaaccttcttcagcaccaattgccagctgcagcggaaccgggttcgcgcccagacgggttttgatctgaccaacaactttcaggaagttcgcgcccatgcggtccattttgttaacgaacgcaatgcgcggaactttgtatttgtttgcctgacgccatacggtttcagactgcggctgaacaccaccaactgcgcagtaaaccattaccgcaccatcgagaacacgcatggaacgttctacttcgatagtgaagtcaacgtgccccggggtgtcgatgatgttgatgcgatgcggttcatactgcttagccataccagaccagaatgcagtagtcgctgcggaggtgatagtaataccacgctcctgctcctgctccatccagtccatggtagctgcgccgtcatgaacttcaccgattttgtggtttacaccggtgtagaacagaatacgttcggtagtagtggttttaccggcgtcgatgtgcgcactgataccgatattacggtagcgtgcgatgggtgttgtacgagccatttgattcctcgttgatatctttaggcgttcagttaagttatccaaaacgggcgacttacctgaagcgcccgcctggtgactatgactccgaagggattaccaacggtagtgtgcgaacgccttgttggcttctgccatacggtgaacgtcttcacgtttcttaactgcagtacctttgttttctgcagcgtcagaaagttcgttcgccagacgcagagccatggatttatcaccgcgtttacgagcagcttctacgatccaacgcattgccagagcattacgacggaccggacggacttcaactggtacctgataagtagaaccacctacacggcgggatttaacttctacagtcgggcgaacgttttcgagagcgacttcgaaagcttccagttcagatttaccagaacgctgagccagggtctccagcgcgctgtatacgattgattctgcagtagattttttaccatctaccatcaggatattgacaaatttagccagcagttctgatccgaacttcggatccggcagaattttacgctgaccaatgacgcgacgacgtggcatggaaatactccgttgttaattcaggattgtccaaaactctacgagtttagtttgacattaatttaaaacgtttggccttacttaacggagaaccattaagccttaggacgcttcacgccgtacttagaacgagcttgcttacggtctttaacgccggagcagtcaagcgcgccacgaacggtgtggtaacgaacacccgggaggtctttaacacgaccgccacggatcaggatcacggagtgctcctgcaggttgtgaccttcaccaccgatgtaggaagtcacttcaaaaccgttagtcagacgaacacggcaaactttacgcagtgcggagttcggttttttaggagtggtagtatatacacgagtacatacgccacgtttttgcgggcatgcttccagcgcaggcacgttgcttttcgcaactttgcgagcacgtggtttgcgtaccagctggttaactgttgccattaaatagctcctggttttagcttttgcttcgtaaacacgtaataaaacgccctcacacaatatgaggacgccgaattttagggcggtgtcgaaaaggtgtcaagaaatatacaacgatcccgccatcaccaggccatctggttggcatacttaaccgtgagtctgacaaaatcagtatagtcaaccctgacgacactgtctgaaatttgaccacccaggccgcgggcgtcaatgtcttctttcaaggcatagaccgttatgggggcatcgcgcagactttcaaggaagcggttaccttcaatcgcgacggtaacgccatcctggagcaacaaaagcgcatcgccctcttttagcaggcgcagcaaagcgggaaaatcaacgctcgaagcgcaatgaggtaaggtatgcagcataaacgcctcagaatctcaggatgacatcatagttgccaagctcgcggcgtaacgccacgggttccagcggcgtggcgtctaccacaaaattaacgttctccagaccacgctcgcgcagcgatgccgcgcagatccagcattgatcaatatcgtacaaatcaaagagcttgaaagtagcaatatagtcacgcgccagcacagcgtctggtttttgtcccggtaataactgaaagacgccgtcgctgataaaaaagacgcccagcgcttccgttagcgctgacgtcgccagcagcgcatccagtccttcacggcctgaggcgctgccgtgcggcgcggtggaaaagacaaatgcaatacgtttcattaaaactgcaccacccgatcgcaggtgagagatgcctccgccagcgcgcccagcccgcttagcgtaaagcccggctgaagattggcggacggcaactccagtctgccggcttcagtttcatcaataataccgcgacgaagcgccgccgcgacacagatgttcagcgctacgccatgctgcgtattcaatttctgccaggcgcgtaccagatcatattcatcgctcgccggcgaggtcaggagattggcgttatagacaccttcccgatagaaaaagacgctggctaactcatgcccctcattgagcagcgcgtgggcgaactgcaatgcgctgctggcctgctgggtgccatatgccggcccggtgaccataatggcataacgcattatttatcctgcccctgaaaatcgccgcttttgaactggcgaatatagaggtaaaccgtgtgttttgagatattcagacgatcggctacctggttaatggcgtctttaatatcgaaaatgcctttttcgtacaagttaaggacgatctgacgatttttcgcattgttagagacattacgatcggcattcacttcttcgatcgtgaactccagcgtctgggtgactaaatcttcgactgaggaggcaaaattaaccgctgagccgacttccggcgtttccggcggaataaaggtattcataatctgtgaaaatggcacatcaagattcatgttgatgcacagtagaccaatgacgcgctgctcgcggttgcgaatggcaatcgtcaacgacttcatcaagacaccgcttttcgcgcgcgtgaaatagcatttcgacacgctactgtccgcccctgtcatgtcgtgcaacatacgcaacgccaggtcggtaatcggcgagccaattttacggcccgtatgttcgccattggcaatacgaatggctgaacattttagatcctgcaaagagtgcaatacgatttcacaatgggaacctataagcatcgctaacccgtccactaccgcttcgtaggatttcagaatatcgaagtcggtttgctcgaagggacgctgatccagcaaatcaagttcactggtttcgttggttaaaagcgacctggacatgaaaaaaaacactccttttcaggagcctgtcgttatgttttcagggcaggctcattatttacgcggatgattaaattaatacagtgagggttcatctttccagtactaatttgctcgtctatttcagactacgtgtgcgttggcggtcattcagcctacggtctcgcccttaacgaccagcgcaagcgccgttatccgcaaatcaaattatggtgagtaatatatccggcctgaataaaaaaaccgccgctattacaagcggcggctctcagtttttattttttagcagcatctgcggctttagcgtcagccgcatcggcaggtttagcatccgctttcggcgctggtttgatatccagcagctctacgtcgaataccagggtggagttcgccgggatacccgggacgcccgttttaccgtaggccagcgccggtgggataaccagcttgatcttgccgcctttcttaatatttttcaggccttcagtccagccagggataacgccgtccagacggaaggagagcggttcgccgcgcgtgtaagagttatcaaactctttaccgtcgatcagcgtacctttgtagttcaccacaacggtatcgctatctttcggcgcctcgcctgtgccttctttctctactttgtaaagcagaccggtagaggaggttttcacgcctttctctttagcaaaagcgtcacggaacgttttaccttttgcttcgttatcggcagcgtctttttccatcttcgcctgagcagcgctcttcacacgtgcttcaaacgtctgcagcgtttgctcaatttcctgatcggacagtttgctcttatcggcaaaggcatcctgaacgccggcaatcaactgatctttatccagtttgatgcccaacttttcctgctctttaagcgaattttccatgtaacgacccagcgaggcgcccagcgcataagccgctttttgatcgtcgtttttaaatgctgctttgctatcagcggtagctgccggtttcgccgcatcagcagcaaaagtgatcggtgcgtgcatagcaacggccatcgtcgttgccagcagcgtggctttaaacagtgatttcatccatatctccagggccggggcatctcgccccatgttaacttacgtaagaagcgtactataaatcgttgcagaacaaatcaacatacgaacacgccctattatcacttcttttcagactctttttgtttaaattagtttcgtagggcgcgtaatggttgctgtgaaagccggtaaagttaagtagaatccgccgacggagacaacataaagaggtacatcatgcaggatatcacgatggaagctcgtctggctgaactggaaagccgtctggcgttccaggagattaccatagaagaactaaacctgacggtaaccgcacatgaaatggagatggcgaagctgcgcgatcatctgcgtttgctcacggaaaagttaaaagccagtcagccgtcaaatatcgcctctcaggcagaagaaacgccgccgccgcattattgagacgaaaaaaaagcggggttaacccgctttttttgtgcccgatgatttatcgaaccaatgataataccctaaggatttcgagtcacagcaaggcggcaagcttgaaaattccccgggagcatagataactatgtgaccggggtttgaaagcgtagccaacaccgcggtggcttgaaagacgacagggattaatggcaaccgcaaccgcctttaccaccaccgccgcagcagccttcgccgccgtgctcgtgaccatggtcatgaccatgaccgccacagcaaccgtcttcaccgtgatcgtggtggtgatcgtgcgcgccgtgaacatgaccgtgagccagttcttcttcagtcgcttcacgaatcgcaacaacttctacgttaaatttcagattctggcccgccagcatgtggttaccatcaaccacaacgtgatcgtcttccacttcggtaatctctaccggtaccgggccctggtcggtttccgccaggaaacgcatccctacctgcagttcatcaacgcccataaagacgtctttaggcacacgctgcaccagattttcgtcatactggccgtaagcgtcgttcgcaccaacagcgacatcaaatttgtcgccaacttcatggccttccagcgccgtttccaggccagagatcagagagccgtggccgtgcaggtaatccagcggcgcactcaccggagactcatcaaccaacacaccgtcttctgtacgtacctgataggccaggctgaccaccaggtcttttgctactttcatgatatctcctgagcatgggaagaatagtggcgcagattgtagcggaattctgcagccgtgtaccccttagcttaaaaaaacctgcggcatatcgctagtccggatgaaaaatcccaatcacttgctcttctttgcgaacatgctcgcgaacgtctttatccgcctcccgcatttgatgcccgcacttaacgcattcaacaatatcgacattattttcacgccacatcgccattgtgtcctgcgcctgacaggctggacatttcgcgcctgcaataaaacgtttacggattgccattgttcacctctactcaaattcatcccagccatccagctggcgacgctcctgttgcatttcgcgctgaaaaatctcctccagctcgcgtcgggcctctctggcgcgcgaaatctgtaccatgtcgctatgctccgggatcagctcccgcagcattcgcatatccagccgacgaaaatgcaactgcgcgcgttgcgcctgatgcggatgcatacctaacgacaccagagttttacgtcccagttccagcgcgctggaaaacgtttcacgggaaaactgcgtgacgccagcctgtaataactcatgggcctccacacgtccacgcgctcgcgcaagaatatgcagatgaggaaaatgctgctgacacaactccaccagcttcatcgtgtcttccggttcattacacgtgatgactatcgactccgccgcttccgcgcccgcagaacgcagcagctcgacttgtgtagcgtcgccgtaatacactttataaccatatttgcgcatcagattaacggcgccgatatcgcgttccagcacggtgatacgcatcttattcgccatcaataagcgagcgatcacctgaccaaaacggccaaagccgacgacaattacctggggcttatcatcctcaacccacggcttttcatcattctcttccgggccattaaggcggcgcgataaccacttatcaatccctttcatcagtagcggcgtggtcatcattgataacgtgacagtcaccaataataacgccatctgatcgccctgaaacaggcgctgagaagaggcggtagaaaagagcacaaaagcgaactcgcccccctgactcagcacgctggcaaactgcatccgttcagaacttcttattccatatagccgcgccagcagatacagcgtcaacatttttatgacgaccagaataacaacgctcgccgccacccacagtaaatgggtataaagtacgccgagatttagcgacataccgacggagataaagaacagcccaagcagtaaacctttaaagggatcgatagcgttttccagctcatgccggtattcactctctgccagtaaaacgccggcaatgaaggttcccagggccatcgacagtcccagcgcatccataaataaggcggcgctcaacaccagcaacagcgtcgcggcagtgaagacctcccgcacgccagacgcagcaataaaacgaaataccgggcgcagcaggtaacgaccgccaatcagcattaccgcgaaagccagtaccttcattgccactttaaaccagtcgaaatgctcgtcggccgatcccgccaataaaggcaccaacgccagcgcggggatcaccgctaaatcctgaaacagtaagacggaaaaccctaactgcccggactcgctacgattcatgcctttctcgcgcatcagttgtagcgccatcgccgtcgaagacatcgccaggccaatcccgccgacgaccgccgcctgccataagaaatcagcaagcatcaataatcccgccagcaccgccgcgcttaacagcacctgagcagcgccgacgccgaagatagagcgccgcagttgccaaagccgggacggattgagttcgagaccaatgataaacatcagaaacacgacgcccagttcggagaagtgaagaatttcgtcgacgtcgctgatgaagcccagtccccacggaccaatcgcgattcccgccagcaaataccctagcaccgcgccgatgcccagcctggcggctaacggcaccgccgccaccgccgcgaagaggaacaacactcccgcggtcaataaatcagcaccttccatcaatagcctcccgcgctcacaggattcgccagccactcgccataggctttcgcatgactggccagcgtctgcggcgactggcggcgcgcccagtacacaataatgggcggcatccagtgcatccgacacatggccgcggtcagttcaaaggggcggagtacatcgctcattggatagcggtttagcgcgtcataccggtaagcgctctccggctcgccggtcgtaatcacgctacgccagtactttcccaccagttggtttccccctggtccgctggcgaacccccgactcaaaacgcgatcaagccattctttcagtaaagccggacagctataggtgtaaaggggatgctgaaaaacaatgacgtcgtgctcacgtaacagggcttgttcatagggcgtgtcgataaaaaaatcaggatagcgcgcataaagatcgtgcacggttacgttattgtgctgtatggccggtttaagcagtacccggttagcaaccgagtcctgagattccggatgggcatacaacagcaagactttcgctggctgagacatcaatccccctcccggttgttttgggtcgatacatgccattcttcaggccgcttctacgttgacagcgtttgttcaactcaggaacgtactctatgtccgccgctggggattaatgagagatattcttgtccctcaccaaaggcggcctgaatgattttgtgtatcgttgttgttttgagctaccattgcgctccagcgcggcggtacgcccgaatattacattatcataatgataaattaacatagtctgaacatacggcgccttatgattgttttctcctcgttacaaattcgtcgcggcgtgcgcgtcctactggacaatgcctcggctatcattaatccaggccagaaagtcggcctggtgggtaaaaacggctgcggtaaatctaccctgctggcattgctaaaaaatgaaatcagcgccgatgccgggagttttaccctgcccggaacctggcaattagcgtgggtgaatcaggaaacacctgcgttgcctcagccagcgattgagtatgtcattgacggcgaccgtgaataccggcagctggaggcgcagcttaacgacgccaacgaacataacgacggacatgctatcgcctccatacatggcaagctggacgccatcgacgcatggaccgttcgttcgcgcgccgccagcctgctacacggtctcggcttctctaacgatcagctggaacgtccggtcagcgacttttccggcggctggcggatgcgccttaacctggcccaggcgctgatttgccgttccgatttactgctgctcgacgaaccgaccaaccacctcgatctggatgccgttatctggctggaaaaatggctgaagagctatccgggcaccctgattctgatctcccacgatcgcgattttcttgacccgatagtggataaaattatccatatcgaacaacagactctgttcgagtacaccggcaactacagcgcgtttgaagttcagcgcgccacgcgcctggcgcagcagcaggcgatgtatgagagtcagcaggagcgtgtggcgcatctgcaaagctacatcgaccgtttccgcgccaaggccaccaaggccaagcaggcgcaaagccgtatcaagatgctggagcgtatggagttgattgcgccggctcatgtcgacaacccgttccatttcagcttccgcgcgccggaaagcctgccgaacccgctgctgaaaatggaaaaagtcagcgcaggttatggcgatcgcatcattctggaatccatcaagctgaacctggtgcccggctcgcgtatcggcctgctgggccgcaacggcgcggggaaatcgacgctgatcaagctgctggcgggcgaactggaaccgttgcacggtgaaatcggcctcgccaaaggcattaagctcggctacttcgcccagcaccaactggagttcctgcgcgccgatgaatccccgttgcagcatatggcgcgtctggcgccgcaggaactggagcagaagctgcgcgactatctcggcggcttcggtttccagggcgacaaagtaacggaagagacgcaacgtttctccggcggcgagaaagcgcgcctggtactggcgctgatcgtctggcagcgtccaaatctgctgttgctcgatgaaccgaccaaccacctggatctcgacatgcgtcaggcgctcaccgaagcgctgattgatttcgaaggcgcattggtcgtcgtgtcgcacgaccgccacctgattcgctccaccactgacgacctctatctggttcacgacaaaaaggtcgaaccgttcgacggagacctggaagattatcagcaatggctgagcgacgtgcagaaacaggaaaaccaggccgacaacgcgccgaaggaaaacaacgccaacagcgctcagtcacgcaaagatcagaagcgtcgcgaagccgagctacgcactctgacgcaaccgctgcgtaaagagattacccgtctggaaaaagagatggaaaagctcaacgcccaattagcgcaggcggaagagaagctcggcgacagcagcctgtatgaccccagccgtaaagcggagatgaccgagtgtctgcaactgcaggccagcgccaaatccgggctggaagcgtgtgaaatggcatggcttgaggcgcaggagcagcttgagcagatgatgcagaacgactaagagcctatcccattaggctattttattcgccattttagggccgggcagtgctcgaaatcctcacgtactatgtgtacgctccggtttctgcgcgctgtccggccccaaactggcttcaacaattacgcctactgggataggctctaacgcacggggcggacgatgaacctgtcaattaccgatgacattaccttccgcaagctcaccatcttaatgatgcttgtggagaagggtaacatcgcccgcaccgccgaggcgctgcacacgctgaaagagaacgttcgttgtccgctgttcgtccataaaggcctcttcggtactcgtcccgatataaaggttaccgttgcggtcggcagcaccggaacagaaggctgcgttatgtgatttagcggcaaaggttgccgtgatttattttcgtcagcgcgtcgttcacgccaaataatttaaacgtcacctcatcaacgccaagatttttcagacgcgcagtgtgttttttaatataagcccgcgccgtttcttcggattcaaacaagtaaatgccgccagcttgctggtttttctcgctttctgtccagattttccagatgaagcccggctcctcattgatagactccgccagcccgaccagttgctgagtcatctcctcgccaaaagggccgctaaagttaaaatggatctgtaaaagtgtcttcgacatgccttctccttgagtcacataactatcgtgttgccacactaccacgattaattcggctgatgcagaggttcacgcgatttctgtggggtattgcgcgcgccttgcataccgccccctctggtgaaatgaggcgcaattttatttcgccagacgaccaattgaacgtaaaatcacatattgactaatctgtgaaccttatgcgcggtatagtattgtttccaattatcaattgttctggtgctatggttgagatcacgtccacagaaatgaccccgcctgtcaatgactcgcatgaatttattcccatgcgtggcattcgtaatcgccatttacaaactatgctgccgcgcttaatccgccgcaaagtgaagttcaacgcccactggcagcggctggagctaccggacggcgattttgtcgatctggcatggagcgaagaaccgcaacaggcaaagcataaaccgcggctggtggtctttcacggtctggaaggcagcctgaacagcccctatgcccacgggctgattgaggcggcgcaaaagcgcggctggctgggcgtggtgatgcactttcgcggctgtagcggcgaacccaaccgtctgaatcgtatttaccactccggtgaaacggaggacggagcctggtttttacgctggctacagcgggagttcggcgccgttccgacagccgccgtgggctattcgctcggcggtaatatgctggcgtgcctgctggcgaaagaaggccgcgatattcccatcgaggcggcggtaattgtttctgcacctttcgttctcgaagcctgtagctaccacatggacaaagggttttcccgcgtctatcagcgttatttgcttaatctgttaaaagcgaatgcgtcacgcaagctggcggcgtaccccgggtcgctgccggtgaatctggcgcaactgaaatcaatgcgccgtattcgcgagtttgacgacctgatcaccgcgaaaattcacggctttgccgacgccatcgactactatcgtcagtgtagcgccatgccgttgcttaaccagattgctaaaccgacgctgattattcacgctaaagacgatccgtttatggatcatcatgtgatccctaaagcggaagatctgcccccgcaggtggagtatcagctaactgagcatggcggacacgtaggatttatcggcggtacgccgctgcgccctgaaatgtggctggaacgccgaattcctgactggctgacaacgtacctggaggcgtcatcatgatcattccctggcaggggctcgcccccgacacgctggacaacctgatcgaaagctttgtgttgcgcgaaggcaccgattatggtgaacatgaacgttcgcttgaacaaaaagtcgctgacgtaaaactccaactgcaatccggcgaggccgtgctggtatggtctgaattacatgaaacggtcaatattatgccgaaaaagcagtttcgcgaataaaacgcctttgccgacaatacattattctaaagctcaatcatggagttgccatgtcagccaaacatccggtgatagcagtaacagggtcaagcggcgcggggaccaccaccaccagcctcgcgtttcgtaaaattttcgcgcagttaaatctgcacgccgccgaggtggaaggcgacagttttcatcgttacacccgcccggaaatggatatggcgatccgcaaagcgcgtgacgccgggcggcatatcagctatttcgggcctgaagccaatgacttcagcctactggaacatacctttattgagtacgggcagacgggtaaaggccagtcgcgtaaatatctgcatacctatgatgaagccgtaccgtggaatcaggttcccggcacgtttaccccctggcagccgcttcccgaaccgaccgatgtgctgttttatgaaggactgcacggcggcgtcgtcaccccgcaacatgatgtcgcgcgtcatgttgatctgttggttggcgtggtgcctatcgtcaacctcgagtggattcagaaactgattcgcgacaccagcgagcgcggacactcccgtgaagcggtgatggattccgtggtgcgttccatggacgactacatcaattacattacgccgcagttctcgcgtacccatatcaacttccagcgcgtaccgaccgtcgacacgtccaatccgttcgccgcaaagggtattccctcgctggatgagagttttgtggtgatccatttccgcaatctggaagggatcgattttccctggctcctagcgatgctccagggctcgttcatttctcacattaatacattagtggtgccgggcggcaaaatggggctggcgatggagctgattatgttgccgctggtgcagcgattaatggaaggcaaaaaaatcgaataaccgtggtgaaatgcccgatggcgctacgcttatcgggcctacgagataaaaacgggtaggccggataaagccacgccgccatccggcatcacatgttacgccgcaatcacttcatacgaatgggtaatattgaccgctttttccagcattagcgccaccgagcaatatttttccgcggagagatcgacagcgcgcgcgacggcagcctctttcagatcgctgccggtaacgataaaatgcagattaatgtgcgtaaacaggcgcggcgcgtcttcccggcgctcggatgtcagcttcacttcgcagttggtgacattctgacggcccttttgcaggattgataccacatcaatagcgctacatccgccagccgccattaataccatctccatcggactcggcgctttgtcaccggagttaccatccattaaaatctggtggccggaggaggactctccgaggaacgtgagcccttcaacccactttacacgcgcttgcatatttcgtaactccaatgtttcaattttcctgaaagattacgcgcatacaacaaaagtcgcaatggaaggcgacctgggtcatgctgaagcgagacaccaggagacacacggcgaaagctatgctaaaacagacaagatgctacagtaatacattgacgtactgcatgtatgcagaggacatcacattacaggctacaatctattttcgtagcccccttcccaggtagcgggaagtatatttttgcaaccccagagacagtgccgttttctggctctggagacagcttataacagaggataaccgcgcatggtgcttggcaaaccgcaaacagacccgactcttgaatggttcttgtctcattgccacattcataagtacccgtcaaagagcacgctgattcaccagggtgaaaaagcagaaacgctgtactacatcgttaaaggctccgtggcagtgctgatcaaagatgaagaagggaaagaaatgatcctttcttatctgaatcagggtgattttattggtgaactgggcctgtttgaagaaggccaggaacgcagcgcctgggtacgtgcgaaaaccgcatgtgaggtcgctgaaatttcctacaaaaaatttcgccaattaatccaggtcaacccggatattctgatgcgcctctcttcccagatggctcgtcgcttacaagtcacctctgaaaaagtaggtaacctcgccttccttgacgtcaccgggcgtatcgctcagacgctgctgaatctggcgaaacagcccgatgccatgacgcacccggatgggatgcagatcaaaatcacccgtcaggaaatcggccagatcgtcggctgctcccgcgaaaccgttggtcgtattttgaaaatgctggaagatcaaaacctgatctccgcgcatggcaagaccatcgtcgtctacggcacccgttaattccgtcagaatggcgcgttttatcatgcgccatttttgtttgcatcgatgtggcgaagactgatttatcacccagagattaattacgcactacggcaaacgctggtgctgtgtctgcctgtggctgtcggtttattgataggccagctacacctgggcttgcttttctctctcgttcccgcctgctgcaacattgcaggtctggataccccgcacaaacgtttttttaaacgcctgatcatcggcgcgtcgctgttcgccggatgcagtctggtaacgcaacttctgctggcggaatccatccccctgccgttgatcctgaccgggctcacgctggtgcttggcgtgacggcggaaattagcccgcttcacgcgcggttactgccagcgtcgctgattgccgccatctttaccctgagtcttgcaggatacatgcccgtctgggagccgctgctcatttatgcgctgggcacgctatggtacggcgtgtttaactggttttggttctggctatggcgcgaacagccgctgcgcgagtcattgagtttgttataccgtgaactggccgattattgcgaagcgaaatacagcctgctcacccaacatatcgatccggaaaaagcgctgcctcccctgctgatacgccagcaaaaagcggtcgatctcattacccagtgttaccaacagatgcatatgctttcggcgcacaacaataatgattacaagcgcctgttacgggcttttcaggaagcgatggatttgcaggagcacatctccgtcagcttgcatcagccggaagaggtacagaaactggtagaacgcagccatgcggaagaggtgattcgctggaatgcgcaaacggtcgccgcccgtctgcgcgtgctggcggatgacattctttatcatcgtctgccgacgcgcttctccatggaaaaacagattggcgctctggagaaaatcgccaatcagcatcctgaaaatccggtaggccagttctgctattggcacttcagtcgaatcgcccgtgtgctgcgtactcagcggccgctgtacgcccgcgacctgatggccgataaacagcgtcgtttgccgctacttccggcgctgaaaaattatatgtctcttaaatcaccggcgctacgcaacgccggacgcatcagcgtgatgatgagcatcgccagtctgatgggcagtgcgttgcacctgcctaaaccgtactggatactcatgacggtgctgtttgtcacccaaaacggctatggcgcgacgcgcgtacgtattctgcaccgttcagtcggaacgctggtcggcctggtgattgccggcgtcacgctgcacttacatattcccgaaagcattacgctggcggtcatgctggtactaacgctggcaagttatctgattattcgtaaaaactacggctgggcgacggtcggctttacggtgacggcggtatacaccatccagttactgacgttaaacggagagcagtttattgtgccgaggctgatcgatacgctgattggctgtttaattgcctttggcggcatggtctggctgtggccgcaatggcaaagcgggctattacgtaaaaacgcccatgatgcgctggaagccgatcaagaagctatccgactgatcctcagtaacgatccgcaggccaccccgctcgcttatcaaagaatgcgggtcaaccaggcgcataacacgttattcaactcgttaaatcaggcaatgcaggaacccggattcaatacccactatctgtcggatatgaaactgtgggtcacgcacagccagtttattgtcgagcatatcaacgctatgacgacgctggcgcgggaacacaccatgctgacgcctgatctggcgcagcgctatctggaatcttgcgagattgcgattcagcgctgccagcagcgcctggagtacgacaggccaggcggctccggcgatgtcaatattctggagtcgccggacatgccgtcacatggcttattgagcactctggaacaacatttacagcgcatcattggccatctgaacaccatgcacaccatttcgtcgatggcctggcgtcagcgtccgcatcacggtatctggctgagtaagcggctacgggatacaaaaagttaagaccgactgccggatgcgctacgcttatccggcaatctgccatcaggcaaccaccttccctaccgcctgcgcaaagcgctgcattccttcattgatatccgcatcttccaccaccagcgacggggcaaaacgcatcacgtcggctccggcattgagcaccatcacgccggcctccgcgcctgcgtacagaaaatcgcgcgcccgatctttgtacttcggcttcagttccgcgccaatcagcagccccatgccgcgaatatcgctgaaaatgtcaaattgctcgtcaatcgcctgcaaatgttgcacaaactgttgccgcttagtgtgaatgccttgtagtacttctggcgtattaataatatcgaatgccgcgccagccaccgcacaggccagcggattaccgccataggttgaaccatgcgaaccgacatggaaggccgaggctatttcctgcgtggtcagcatggcgctcaccggaaaaccgccgcctaacgctttggcgctggtgaggatatccggcgtgacgccgtagtgcatataggcaaacaggtctccggtgcgccccatcccgcactgcacttcatcaaacaccagcaacgcctgatgctcgtcacacaggtcgcgtaaccctttgaggaattccggtgtagccgcctgcacgccgccttcaccctgaatcggctcgaccaccaccgcgcaggtgtggtcatccattaccgctttcaccgcatgaagatcattgaagggaacgtgaataatatcggcgggtttcggcccaaagccgtcggaatatttcggctgcccgcctacagagacggtaaacaaggaacggccatgaaaggcgttatggaaggcaatgattttcgttttgaacgggctatggcgcacgcaggcataatgacgcgccagtttaaaagcggtttcgttcgcttcggtgccagaattcataaacagcacgcgctcggcaaacgtggcgtcgatcagtttacgtcccagacgcaacgccggttcattggtaaaaacgttactggtatgccacaaggtttccccctgggatttcagcgcctcgaccagtgccggatggcaatggcccagcacagtcactgcaatcccgccggcgaaatcgatatactctttgccctgctgatcccatacgcggctgcctttacctttgaccggaataaagtccgccggtgcataaacaggcagaatcacctcatcaaaagttgcgcgcgtaatagccgtttgttcagttgccatatcattaccacccggttaagtagaaatgccagtgaaattataatcacaaaatatgaataaaaaatcactcaatagcaaccacaaatcaacgccggaggaaatttttcagcagagcgtgtccttgttcgctgagaatactttccgggtggaactgcacgccttccagatcccactcgcggtggcgaatgcccataatctcctgcgtttcgctccaggcggtgatctcaaaacactcaggcaacgtggcagggtcgacaatcagcgagtggtaacgtgtcacggttaacgggctgggcaatccccgaaacacgccctgtccattatgcgtaacaggtgacgttttaccgtgcatcactttcgctgcccgcaccaccgacgcgccaaaggcctgcgccatcgcctgatgacccaggcaaacgcccagcatcggaatacgtccggcataatggcggatgaccgccagtgaaatgccagcgtcattcggcgtacaggggccaggagagataacgattttttgcgggttcaaagcgtcaatgtgcgccagcgtcagcgcatcattgcgccggacctgcacttccgcgcccagttcacaaaaatactggtagaggttccaggtaaaggaatcatagttatcgataagcaggatcatggcggctccgggtgagtagaaccgcactattttactcagtttcgcgagcttcgcttatcgctttctgaaaaatcgcctgcaaagcggagagatcgcccatcgcgccgctctggttcgcctgcttccatgtttcaaccgcaataccttgccaactcagcgcatagcctgcatgtaacgccagctgttcaaagaagatgcgctgcgccagcccgctccccaaacgaaacggatgaagcacgttaatttcacagtagtaatgcgccagccgctcgacaaacttctcgtgcgccagaccgaccagatagccctcttcttccagatcctgcatcagagcattgccctctttttcgatataggcaaagtggcagaaacgggtatcgccctggtaaatatcgacctcccgcagttgccctgcccagtcgaaaatatcctgatagagctggcgatgaatcgcgcacagatgaggcaagccgcgtatcagcggccccagttcaatcgtggcggcgcggagcgcggtcatttcgtatgccgcttgcgccagtcgctgggcctgatgaatccccagccgattacgcatcacgttcagccccggatagaggtacggatcgcgcccttcgccaaatttatcgctcatagtgcctccgaagctcgtcaagacgtgccagcgcttcatcggcggtcagggttactaaggggatctcaataccttcgagacggcggctttgctggaagttaacgttgcgccgctgttcccaaaagcgtgacttttgtttatcggtaagtttcttcaccgggcctccctgaatatgtctgtgcttgaccacaagtataagcagcaatttcaggttacgctgagacagggagaaaacgcgggcggctcgcgcccgcgcaggcatgttttatggcaggactttcgcggaaaggataacgactggttttgtcggcacattctgataaggcccgacatcgtgcgtcggtacctgtgagattttatcggcgacatccataccttttaccactttaccaaataccgcatagccaaagtcgcgctggccgtggtcgagaaaagcgttatccgcgacgttaataaagaactggctggtggcgctgtctttatctgcggtgcgcgccatcgcgatcgtgccgcgagtattacgcagaccgttgtcggcttcattcttaatcggcggattcggtttcttctgctgcatctgctcgttaaaaccaccgccctgaatcataaagccaggaataactcggtgaaacgtagtgttgttatagaaaccactgttgacgtaatcgacaaagtttttcacagaaatcagcgctttctggctgttcagctccagctcaatattcccggcggaggtggttaacagcacatgaggatcaccttttgctgccaacgctacgggagaaagagcagaaagagcgaaaacagctgcgacagccgccagagtcgatttgagcatgagatttccttaaagagagcagaaataaagcaagtggaatgattctaaagagccttcctgggccaggccagccctttacctaattttacgtacatgaaacaaatgtaacgttacgacgcaacgccttgtccttgcaatatgatgtgacaaacatcacattaaaaaatgtaatgaacattactatcactaataattatttaaatacatcacaaaaacgcctaaaatctgcccgcttaacgcgccctccacgcgcttcacttctcttcaaggccagacatgactaacagcaaccgcatcaagctcacatggatcagctttctttcctacgccctgaccggggcgctggtgattgtcaccgggatggtgatgggaaatatcgcagactattttcatctgcccgtttccagcatgagtaacacctttacttttctgaacgccgggattttgatctcgatcttcctcaacgcgtggctgatggaaatcgtcccgctgaaaacacagctacgctttggttttatcctgatggtgctggcggtggccgggctgatgttcagccatagcctggcgttgttctcagcggcgatgtttgtgctggggctggtcagcgggatcaccatgtcgattggcaccttcctgattacgcaactgtatgaagggcgtcagcgcggttcccgactgctgtttaccgactccttcttcagcatggcggggatgatttttcctatggtcgccgccttcctgctggcgcgtagtattgagtggtactgggtctacgcctgcatcggcctggtctacctggcgattttcatcctgaccttcggctgtgaatttccggcgctgggtaaacatgcgcagcactctcaggcgcctgtcgccaaagaaaaatggggcattggcgtactgtttctggccgtcgccgcgctgtgctatatcctcggtcaattaggctttatctcctgggtgccggaatacgccaaaggcctcggcatgagcctgaatgacgccggggcgctggtgagtgatttctggatgtcctatatgtttggcatgtgggcgttcagctttatcctgcgctttttcgatctgcaacgcattctgaccgtactggcgggtatggcggcggtactgatgtatctgtttattaccggcacgcaggcgcatatgccgtggtttattctgacgctgggcttcttctccagcgccatttatacctccatcattacgctgggatcgcagcaaacgaaagtggcctcgcctaagctggttaactttattctgacctgcggcactatcggaacgatgctgaccttcgtcgtcaccggcccgattgtagcgcacagcggcccacaggcggcgttactcaccgcgaatggtctgtatgcagtggtctttgtgatgtgctttgcgctcggctttgtctcccgtcatcgtcagcatagcgcgccggctacgcattgataatccttgccggatggcgacatcgccctccggcactctatcccccctcctgacggggtaggcctgttggcctaaaaacccctcattttgtatgtcatttgtacaaacctgaaaagcctgacaattccgccacttataaaaatccagacaaatcagccacatacccattaagaggtatataaaggtgaatttgatttacatcaataagcggggttgctgaatcgttaaggtaggcggtaatagaaaagaaatcgaggcaaaaatgagcaaagtcagactcgctattatcggtaatggtatggtcggccaccgctttattgaggatctccttgataaatccgacgctagcctgttcgacattaccgtgttctgtgaagaaccccgtaaagcctatgaccgtgtccacctgtcatcctacttctctcaccacaccgcggaagagctctctctggtgcgtgaaggattttacgagaagcacggcgtaaaggtactggttggcgaacgcgcaattaccattaaccgtcaggagaaagtgattcactccagcgcgggtcgtaccgtttattatgacaagctgatcatggcgaccggttcctatccgtggatcccgccgattaaaggctccgaaacccaggattgcttcgtttaccgtaccattgaagacctcaacgctatcgaagcctgcgcccgtcgcagcaagcgcggggcggtggtcggcggcggtctgctggggctggaagccgctggcgcgctgaaaaacctcggcgtggaaacgcacgtcattgaatttgcgccaatgctgatggcggaacaactcgatcaaatgggcggcgagcagctacgtcgcaagatcgaaagcatgggcgtgcgtgtacacaccagtaaaaacacgcaagagattgttcagcagggtaacgaagcgcgtaagactatgcgttttgccgacggcagcgagctggaagtcgatttcatcgtcttctctaccggtattcgcccccgcgacaagctggctacccagtgcggtctggccgtcgcgcagcgcggcgggatcgtgattaacgacacctgccagacgtctgacccagatatctacgctatcggcgagtgcgccagttggaacaaccgcgtttacggtctggtcgcaccaggctataaaatggcccaggtcgccgttgaccatatcctcggcagtgaaaacgcctttgaaggggcggatctcagcgccaagctgaagctgctgggcgtggacgtcggcggcatcggcgacgcgcatggccgcacgccgggcgcgcgtagttacgtttacctcgatgaaagcaaagaagtctacaaacgtctaattgtcagcgaagataacaaaacgctgctcggcgcagtactggtcggcgacaccagcgattacggcaatttgctgcaactggtactgaacgccatcgaactgccggaaaacccggattcgctgatcctgccgtcgcacgcgggcagtggtaaacccgctatcggcgtggataaactgccggacagcgcgcagatctgctcctgcttcgatgtgactaaaggcgatctgatcgccgctatcaataaaggctgccataccgtggcggcgctgaaagcggaaaccaaagccggaaccggctgcggcggctgcatcccgctggtgacgcaggtactgaacgccgaactggcgaaacagggtattgaagtcaacaacaacctgtgcgagcactttgcttattctcgtcaggaactgttccacttaatccgcgtggaaggtatcaaaacctttgaagaactgctggcgaaacacggtaaaggctacggctgcgaagtgtgtaagccgaccgtcggttcgctgctggcgtcgtgctggaacgaatacatcctcaagccgcagcacacgccgctacaggatactaacgataacttcctggcgaatatccagaaagacggtacttactcggtgatcccgcgctcggcgggcggcgaaatcaccccggaaggtctggtggccgtggggcgtatcgcccgcgagtttaacctctataccaaaattaccggttctcagcgtatcggtctgtttggcgcgcaaaaagacgatctgccggaaatctggcgtcagttgattgaagccggtttcgaaaccggtcacgcgtacgccaaagcgctgcggatggcgaaaacctgcgtcggcagcacctggtgccgctacggcgtgggcgacagcgtcggtttcggcgtggagctggaaaaccgctacaaaggcattcgtaccccgcacaaaatgaaattcggcgtctccggctgtacccgtgaatgtgcggaagcgcagggcaaagatgtgggtatcatcgccacggagaaaggctggaacctgtacgtctgcggtaacggcgggatgaaaccgcgtcatgcggatctgctggcagccgatctcgatcgcgacacgctgatcaagtacctcgaccgctttatgatgttctacatccgtactgccgacaaactgacccgtaccgcgccgtggctggataatctggaaggcggcatcgagtacctgaaatcggtcatcatcgacgataagctgggcctgaacgaacatctggaagaagagatggcgcgcctgcgcgcagcggtggtctgcgagtggacagaaaccgttaacaccccatccgcacaggttcgctttaagcactttatcaacagcgacaaacgcgacccgaacgtccaggttgtgcctgaacgtgaacagcatcgtccggccacgccgtatgaacgtatcccggtcactctggtggaggaaaacgcatgagccagtggcaaaacatctgcaaaatcgatgacatcctgccgggaaccggcgtctgcgcgctgttaggtactgaacaagtcgcgattttccgtccttaccatagcgatcaggtgttcgcgatcagcaacatcgacccgttctttgaggccagcgtgctgtctcgtggactgattgcggaacaccagggcgaactgtgggtcgccagcccgctgaagaaacagcgcttccgcctgagcgatggtttgtgcatggaagatgagcagttctctgtgaaacagtacgacgcgcgggtaaaagacggcgtggtgcagttgcgcggttaattatttttgggaggcgcaacgcctccccttttttgtattttttttcattttaattgttatcacaaaatcatttgtactgcatcgcggcggcaactgagcaaatccccaggaacatagttcactatgtgactggggtgagcgagggcagccaacaaagaggcagtgcaaaggatgaagtgagaaaaggataatcaaatgtttacagacactatcaataagtgtgcggctaacgctgcgcgcatcgcacgcctgtcggcgaataatccgctcggcttctgggtcagttcggcaatggccggggcttatgtcggtctcggcatcattcttattttcaccctcggcaatctgctcgacccgtccgtgcgtcctttggtgatgggagcgaccttcggtatcgccttaacgctggtcatcatcgcaggttccgaactgtttaccggccacaccatgttcctgacgctgggcgtcaaagcaggcaccatcagccacggtcaaatgtgggctatcctgccgcaaacctggctcggcaacctggtcggttccgtgtttgtcgccctgctttacagctggggcggcggcagtttgttgccggtcgataccagtatcgttcactcagtcgcgctggcgaaaaccaccgcgcccgccacggtactgttcttcaaaggcgcgctgtgtaactggctggtttgtctggcaatctggatggcgattcgcaccgaaggcacggcaaaatttcttgctatctggtggtgtctgctggcgtttatcgcttccggctacgagcactccgtcgcgaatatgacgctgtttgccctctcctggtttggtcatcacagcgacgcctataccctgtccggaatcggacacaatctgttatgggtcactctgggcaatactttgtccggcgtcgtgttcatgggattgggttattggtatgctacgccgaaatcggagcgtcctgttccgcaaaaaaccaaccaaattaaggttacagccaaccattaaggggtaatgtcgtggaccatttgcctatattttgtcaattacgcgaccgcgactgtctgatcgtcggcggtggcgatgtcgcagaacgcaaagcacggttactgctggaagcaggcgcacgtttaacggtcaatgcgctaaccttcattccacagttcaccgtatgggcaaatgaaggcatgttgactctggttgagggtccgttcgacgaaacgcttctcgactcgtgttggctggcgatcgcggccactgatgacgataccgtcaaccagcgcgtcagcgacgcggcggagtcacgccgtatcttctgcaacgtggtggatgcgccgaaagccgccagctttatcatgccctccattattgaccgctcgccgctgatggtcgccgtctcctcgggcggcacttccccggtactggcgcgtctgctgcgcgagaaactggaatcgctgctgccgcagcatctggggcaggtcgcgcgctatgccgggcaactccgcgcccgggtgaaaaagcagtttgccacgatgggcgagcgtcgtcgcttctgggaaaaatttttcgtcaatgaccggctggcgcagtcgctggcgaatgccgatgagaaagcggttaacgcgacaaccgaacgcctgtttagcgaaccgctggatcaccgtggcgaagtcgtgctggtcggcgccgggccgggcgatgccggactgctgacgctgaaagggttacaacaaatccaacaggcggatatcgtggtttacgatcgcctcgtctccgacgacattatgaacctggtacgccgcgatgccgatcgggtctttgtggggaaacgcgcgggttaccactgcgtcccacaggaagaaatcaaccagatcctgctgcgtgaagcgcaaaaaggtaaacgcgtggtacgcctgaaaggcggcgatccctttatctttggtcgcggcggcgaagagctggaaacgctgtgtcatgccggtattcctttctcggtagtgccagggattaccgcggcttccggctgctccgcctactccggtattccgctaacccatcgcgattacgcccagagcgtacgtctggtcaccggtcacctgaaaaccggcggcgagctggactgggaaaacctggcggcagaaaaacagacgctggtgttctacatggggctgaatcaggcagcgactatccaggaaaaactgatcgcattcggtatgcaggccgatatgccggttgcgctggtagaaaacggtacctccgtgaagcaacgcgtcgtccacggtgtgctgacgcagcttggtgaattagcgcaacaggttgaaagcccggcgctgattatcgttggccgggtcgttggcttacgcgataaattaaattggttctctaattattaattaaaataacgccctgaataacagggctttattttacaactactcgtaatctcaaattatttttacttaaaagtgaattaagaaatcaactttaaatacaccagaaaaatttaaatagtaataattctgcctaaaaacccttttactcgtcaaattcaccccttattcattcatacaataaataacaccgttaagcactcaatttgacctgacctggttatcgggtgataaaataaacactaaagcataatttttcttctggccatttcatcattgcctgtaccgctctctgcatatgtttagtacgcaaggaaaatattaattaaggatgaaccctatgcaaaagaaaaaacttatttctatcgctatcgctttaacgctacaaagttattacattccggccatcgccgcagaaaataacgatgatgaaaaagaatgtcccagtaatatctcctccctgcctaaagaaaaacgcgcaaaactttcaccgacctgccttgctacacctgaaaatgataatcactggggctgggttgctggcggcgttgctgcactggtcgcaggtgtggctattggcgttgaaaataacggtggcggagattctaatcattcttataccccccctacgcccgataatggcggcgatgacaatgtgatcccgcccgacgatagcggcgatgacgatgtaaccccacccgacgatagcggcgatgacgatgtaaccccgcccgacgatagcggcgatgacgatgtaaccccgcctgatgatagcggcgatgacgatgtaaccccgcccgacgatagcggcgatgacgatgtgaccccgcccgacgatagcggcgatgacgatgtgaccccgcctgacgatagcggcgatgacgatgtaaccccgcccgacgatagcggcgatgacgatgtgaccccgcccgatgatagcggcgatgacgatgtaaccccgcccgatgatagcggcgatgacgacgacacgcccccagatgactctgttattaccttcagcaacggcgtcaccatcgataaaggcaaagacaccctgaccttcgacagcttcaaactggataacggcagcgttcttgagggtgccgtgtggaattattcagaacaggacaaccagtggcagctcaccaccgcggacggtaaaacgctgaacgtcaccggctgggacgtgaccgacgccaatgccgccgtgattgaaggcacccaggaaaacggtctctactggaagtacgacagccggggctatctgattattgccgacgataacaccaccgttatcagcggcgatgaccaggcgcataattccgatcgcggcatggatatcagcggccaggatcgcaccggcgtgattatttccggcgatagaaccgtcaacacgctcaccggggactccagtgtgaccgacggtgccaccggcatggttatctccggtgacggcaccaccaacaccatttcgggccactccacggtggacaacgccaccggcgcgctgatttccggcaacggcaccaccaccaatttcgccggtgacattgccgtgagcggcggcggtaccgccatcatcatcgacggcgacaacgccacgattaagaataccggtacctctaacatcagcggcgcaggctccaccggcaccgtcattgacggcaataacgcccgcgtcaacaatgacggtgatatgaccatcaccgacggcggcaccggcggccacattaccggcgacaacgtggttatcgataacgccgggagcactaccgtcagcggcgcagacgccacggcgctgtatatcgaaggcgacaacgcgctcgttatcaacgaaggtaatcagactatctccggcggcgccgtcggtacgcgcattgacggcgacgacgcccataccaccaataccggtgatatcgcggtggatggcgcgggctctgccgccgtgattatcaacggcgacaacggcagcctgacccaggcgggcgatctgctggtcaccgacggcgcgatgggcatcatcacctacggcaccggaaatgaagcaaaaaataccggcaacgccaccgtgcgtgatgcggactcggtgggttttgtggttgcaggcgaaaaaaacaccttcaaaaacaaaggggatattgacgtcagccttaacggcaccggcgcgctggtgagcggcgatatgtcgcaggttacgctggatggcgatattaacgttgtctcagtccaggacagcgaaggcgtgtttagctcagcgacaggggtgagcgtgagcggcgacagcaacgccgttgatatcaccggcaacgtaaatatcagcgccgactacgggcaggatgacctggctgccggggctcccccgttaactggcgttgtcgtcggcggcaacggcaataccgttacccttaatggcgcgctgaatattgatgacaacgatctgtccgccgccagcggacaatacctggacgttgttggcctgagcgtaacaggtgatgataacgacgttgagattgacggcggtattaatatcacccacagcgaggatccacttgatggaacctctgcagacattaccggcatcagcgtcagcggtaacagtaccgttacgctaaacggtcattctaccattgataccaacacggtagtgggggggcacgttgtactggcgcgggtcaacaacggcggctccctgattctgggtgatgactcagttgttgacgttaatgtcagttatatacccacaggctattacacctacaacgcgttgctgatggctgatggcgaaggcacatcaattgaaaataaaggcgatattacaagccatggcgtgtattccgtcattcgcgcagataacggctcggaagtcagcaacagcggagatattctggtctacgcgaccagtagcaacagtagtgaggatcgtgcagccatcacaagggctagtggcgagggatcggctgttcataacaaagccggcggcgatatcaccctcatttctgatcagacgccgcagggcagtggcggtattgaagtatacccattgaaatggtacacccacaccttttacgccatgatggcttcggattatggcgatgtcgttaacgatgagggcgccacgatccatttgcagggggcaggtgtatatggcgttaccgccagccgaggtaaagcactaaacgaaggcgatatctatctggatggccttgtcccgacgctggacgatgaaaataacatcaccagcaccagctactggcagccatcatcgctctatctcaccagctcaggaatggtggcgggttccaccgatgccgatggcgacgccaccgccatcaacaccggcaacattaccgtcaacaacgccgggttcggcatgatggcgcttaatggcggcaccgccattaaccagggcgtgatcaccctgaccgccgatgacggcgtgaccggtcaggcagacgagctggtcgggatggcggcgctcaacggcggcgtcgtcatcaacgacaccagcggcgtgattaacatcgacgccgattacggccaggcgtttctgagcgacagttccagctacatcatcaataacggctctatcaaccttaacggcagcccgatggatgatactgattcacacatgggcggcacgccaacggacaaaatctggattcagtctctgcccggcagcggcgacagcgacaccaggacctccgacacaggtttcttcaccgccggtacgctggccaactacggtactgaaaccctgaacggcgatgtggacgttaacgggggctggctgtacaacgaagcgggcgcctcgctcaccgtcaacggcaccgtgacgattaacggcggggctaacgcgctggctaactacgggacgctggacgcggacgctatttccacctggcacagcctctttaatgaagcggacggcagcatcaccaccgatctgttaacccttaatggcgacgttactttttacaataacggcgatttcaccggctccatagcgggcaccagctaccagcaggaaatcgtcaatactggcgatatgacggtggcggaagatggcaaatcgctggtcagcggcagcttctatttctataacgaagaggacgcaacgcttaccaacagcggcagcgcggtggaaggcggcgagaacaccatcatcaatctgacgcgcgccaacgattcgctgacccaggtgaacagcggcaccatcaccgccactaacggttacagcgccatcaccacggccaacggcagcaatgaccccaaatggatctggaacaccgcaaccggcgtgattaacggtattaacccggatgcgccgctaatcaatttgggccgcggctataacttcggcaaccagggcactatcaacgtgcagggcgataacgccgtggcgattagcggcggcaccagcagttatgtcattaacctggtcaatagcggcaccatcaacgtcggtaccgagcagggcaaggaggacggcaccaacggcaccgggcttatcggcatcaagggcaacggtaatgccaccaccataaacaacaccgcagacggcgtgatcaacgtttacgcggatgactcgtatgcgtttggcggcaagaccaaagccatcatcaacaacggcgaaatcaacctgctgtgcgacagcggctgcgacatctacgcgccgggtactacgggcacgcagaacgaccataacgggacagcggacatcgtcatcccggatgcgactaccgccccgaccgagggcagcatcccgacgccgccagcggatcccaacgcgccgcagcagctctccaactatattgttggcaccaacgccgacggtagctccggtacgctgaaagccaataacctggtgattggcgacaacgtgaaggtggataccggctttaccagcggtacggcggataccaccgtggtggtggataacgccttcaccggcagcaatatccagggcgcggacaacatcacttccaccagcgtggtgtggaacgcccagggtagccaggatgccgacggcaacgttgacgtcaccatgaccaaaaacgcctatgccgatgtggccaccgacagctcggtaagcgacgtggcgagtgcgctggacgccggttacaccaacaacgagctgtacaccagccttaatgtggggactaccgccgagctgaacagcgcactgaagcaggtgagcggtgctcaagccaccacggtattccgtgaagcccgggtgttaagcaaccgctttaccatgctggccgacgccgcgccgcagatcaaagatggcctggcgtttaacgtcgtagcgaaaggcgacccgcgcgcggagctgggcaacgacacccagtacgacatgctggcattacgccagacgttggatctcaccgccagccagaatctgacgctggagtatggtattgcgcgtctggatggcgacggttcgaaaaccgcgggcgataacggcctgaccggcggctacagtcagttctttggtctgaagcacagcatggcgtttgatgaaggtctggcgtggaacaacagcctgcgctatgacgtacataacctcgacagcagccgttctgtcgcctatggcgatgtcaataaaattgccgattccgacatgcgtcagcagtaccttgagtttcgcagtgaaggggcgaaaactttcaccatgatgagtgatacgctgaaagtcacgccgtatgccggagtgaaattccgtcacaccatggaagatggctacaaagagcgcagcgccggagattttaacctgtccatgaactctggcaacgaaacggcggtagactctattgtcggcctgaagctggattacgccgggaaagacggctggagcgccacagctaccctggaaggcggcccgaacctgagctacagcaagagccagcgtacagcgtcattacagggtgcggcgggtcaatcgttcggcgtggatgacggtcaaaaaggcggcggcattaatggcctggcaaccatcggcgtgaaatacagcagcaatgataccgcgctacatctggatgcctaccagtggaaggaagacggtatcagcgataaaggctttatgcttaacgttaagaaaacatttcgttaaataaacgacattatataacactaataaaggccgcttattattaatcggcctttttaaatcatatcatctggtaaagataaagtccttatttggactacctgtatagtttaataattgctatcgtactatacgctaaatagatcttatatttattccatcagtagtgctcgttttatcaacaaggattttgaaatgtttaaatttgtaaaaattgccgttgtggcaggggttctggcgacgctcactgcttgtactggtcatatcgaaaacaaaaaaaataactgcagctacgattatttgctgcaccctgcaatttctatttctaaaattattggcggttgcggcccggctgccgatcaataatagaaacgactgcgcagatacaaaaaaaccgggattttcccggtttttttacaggtctgataaacggtactgcgcagatgccttgtccaacttacgctcgttggtaggcccgataagccagcgccatcgggcaagaaattaccgttacggtttcgccacaaagccaatggcttcgtaaacggctttcagcgtttcggccgcacgtgcgctggctttttccgccccgtctttcatcaccttctgtaagaacgcttcgtcgttgcggaaacggtgatagcgctcctgcaactcagacagcattccggaaaccgcctccgccacttcgcctttcaaatggccatacattttaccttcaaactgtttttccagttcaggaatgctctgaccggtcacggcggaaaggatatccagcaggttagagacacccgctttctctttcacatcataacgcactaccggcggctcgtcggagtcagtgaccgcacgtttgattttcttcactaccgatttcggatcttccagcaggccgatcacgttattacggttatcgtccgatttggacattttctttgtcggctccagcagcgacatcactcgcgcgccggattttggaataaacggttccggtactttgaaaatatcgccatacagcccgttaaaacgctgggcgatatcgcggctcagttccagatgctgcttctgatcttcgcctaccggcaccagattggtttggtacaacaggatgtctgccgccatcaacaccgggtaatcaaacaggccggcgttaatgttttccgcatagcgcgcagatttatctttaaactgcgtcatacggctcagctcgccgaaataggtatagcagttcagcgcccagccaagctgcgcatgttccggcacatgggactgaacgaaaatagtgctcttttcaggatcaataccacatgccaggtacagcgccagcgtatccagcgtcgctttacgtagctgctgcgcgtcctgacgcacggtaatagcatgttggtctacgatgcagtagatgcaatgatagtcatcctgcatgtttacccactgacgcaatgcccccatatagttgccaatggtcaattcacctgagggctgtgcgccactaaaaacgatgggcttagtcattttttatttcctggttatcgctatgcggaagcccaagtgcgggcaaaagatcgttaaaactgtcataaatgacgtccggctcgctaagagcgatcgcttcgccataattgtagccgtatgtcaggccaaccgaagggcagcccgccgcttttgcagcctgaatatcattacgcgaatcgccgacaaaaagcatctgctccggcatcatgcccagccggcttgccaccagcaacagcggctccggatgcggcttcttattttgcacatcatcgccgccgataaccacactaaagtatttggcgatatcaagcgattccagcaacggcgcgacgaacggcgtcggcttattcgtcaccagacctaatgacaatccgctggcgtgcagcgcgcccagcgtgtcggcgacatgcggaaataaaaaagtgccctcttccgccacttcgccataatacctgtcgaacagtttacgcagaatgcgtacctgttcctcggcaggaatatcttcatcaacgggcggtttccccatcgtcttacgcagcgtggcgcgctcctcgcgagcccaggccagcgcgcgttccatcaatacgtctgcgccgttaccaatccaggtaatcacgcgctcctcgcccgcgaccggcagttccagcgcatacagcgccatatccaccgccgcggcaagacccggcgcgctatccaccagcgtaccgtcaagatcaaaggcgacgccccgaatattctgtaacttatccatgagttacctttgccagctcactgcgcatttcatcaattacttttttgtagtcgggtttatcgaaaattgccgaccccgcaacaaacatgtccgcacctgctgcggcgatctcgccgatattgttcaccttcacgccgccgtccacttccaggcgaatgtcgtaaccggacgcatcaatgcggcgacgcacttcgcgcagtttatccagcgtctgcggaataaaagactggccgccgaagcctgggttcacggacatcagcaggatcacatccagtttgtccatgacgtaatcgagataactgagcggcgttgccgggttgaataccagccccgctttacagccgtgttctttaatcagctgtagcgtgcggtcaacatgttcggaggcttccgggtgaaaggtaatgatgctcgcgccagcggcggcaaagtcgggcacgatacggtcgactggcttgaccatcaggtggacatcaataggcgcggtaataccgtactgacgcagggatttcagcaccatcgggccgatagtcaggttcggcacatagtgattatccatgacgtcaaagtgtacaacatcagcaccggcagccagcgctttggcggtgtcttcacccaggcgagcaaaatcagccgacagaattgagggggcaatcaaatactgtttcatccgcttctccttgagaattattttcttgcaggcgttgcgactcctggttggtacagagccagcagttcgtccacctttttacgtgtgccgccgttgctgcttatactgcgtctaactttgacgacatgcaattttgcgagttgataccactcgcgtgtgagcgccgtatcatggttggaaatgagcaccggtatccggttactgaccagattctcagcgatttccgccagatgcgcttgttgcgtcaggctaaaactattggtgtgatacgctgtgaagttagccgtggcggacaacggcgcataaggcggatcgcaatagaccaccgacgacttgtccgcacgcgccatactgtctgcgtatgactcacagtaaaagaacgcattctgcgctttttctgcaaagtggtacaactccgcttccgggaagtaaggtcttttataacgaccaaacggtacattaaattccccgcgtaagttatagcgacagagtccgttataaccgtagcggttcagatataaaaacagtaccgcccgacgaaaggggtcctggcaggtgttgaactcctcgcggagttggtaatagacctcagcctggttagtttcaggcataaacagctcgcgcgaagcctgtacatactcgtcagtacgtaacttcacgatgttatagaggctaataaggtcgctgttgatatcggcgaggatataacgagaaaagtcggtgttaagaaacaccgatccggcacccacaaaaggttcgacaaggcactcgccttttggcaaatgtcgtttgatatcatcaagcagagggtattttccccctgcccacttcaaaaaagcgcgattttttttcatgctgactaactaattacaccttctccggctgtggagaaagctccgacagcatcctgcgctttaggctgtgccgcgttgctttacggcgcatttgacggtagcaaatgcgcccctcgcgcctgtcctgaacaaaaatagctgtcagcgacactcacaggcaattgcaggacacagcctggattatttcagatcggcctgaacctgatgcaacggttttgcccacgggtttttcgcctgcacatcggcaggtaaggtggacaccgcacgtttagcatcttctttcgaagcatacatccccgttaccagcacataccacggttgtccattacgcgtcgtctcgtataccacataatttttcaggttctctttcttcgcccaaccgttcaggttgtcgtaatttgaagaactactgagctgcaatgtgtagtggctggatggcgcgctctttaacgcgccaacgttgccggcgcttttcccgccgcctgcgacaggcgtcgtcgaggcttgcgctggcttcgcggtttgtaccggcgcagcgcttgccgtcgctgtcggcgcagccgtcgtggtggtcgctttcggcgtcgcggctggcgctgccggttccgtacgtttcactggcgcgaccggtttcttcggttccgcagtcgtggttttcgccgtggtctgcggtttcttaggttcaatgacggcctgtttacgttccggacgcgtggtatgacgctcggtaggttcgctaaccgccgcctgacgcgtcgtgctgccattgcgaactggcgcgacggttgcaggctctgtcggcaacgtagagttcaccgcaacattgttcatctgctctggattctgcgtcagcgcattattcagatcgccctgtacttccacgcgctgctgaccgtcagcgaccacaggtgactgtccctgcgtcggcgttgaagaaatcggcggcaacgaaatatcctgcgacgtattgcccgcggtttgttctgcggaggtggcgcccggcgcaggctgggtcgcattcgcctgatcggcggcgttaccggaaagatcgatactcttttcgccagaggccgacggctcgctggaagacgttgagggggctttcagcgcggagccgataccgataatcaacagcagcagcaccagtacgccaacgcccatcatcatgtattgacgagaggctggcttatgggccgcttttttacgcttacgtggacggcgttcaacacgctcttcgtccaccgtatcgtcttcatcggattcgtactcttcttcaacttcaggttcttcactacgcgctttacgcgtacgcgtcggacggcgatcgtcggcatccagatcaacgtcatcaaagttgatctgcggctcattatcgcgttctgaagattgacgagaacgaccagtacgacgatcgctgggatcgggtttcagctcgtcttctggtttgaattcatccatttaacaccccactcaaaggttaatgcttacgacattgcacataacctgaagctaaaagactgacatctacgcaatatcagtctgacctttcttgttgttacgcctgctgacagtcagcaatcgcgctaagaacgacttcgtgcgacactccgccgcgcacttcacttttccctatggccagcggaagcactaaacgcagctcccccgctaacacttttttatctcgcagcatgtgcggcaaatagtcctgcgcggacatctcgcaagggccattgactggcagcccggcccgttcgagtagagcgatgatgcgctgcgtatcagtagaactgaactgccccaaacgctcggatgcgcgcgcagccatcactatacctgcggcaacggcttcaccatgtaaccaattgccatatcccatttccgcttcaatggcgtggccaaaggtatgtccaagattcagtaaagcacgtaagcccgcttcacgctcgtcggcggcaacaacttcggctttcagctcgcaacaacggcgaatacagtacgccatcgccgggccgtccagacgcaatagcgcatccagattaccctcaagccaggtgaagaagtctgcgtcgagtataatgccgtatttgatcacctctgccagccccgatgccagttcgcgtgcgggaagcgttttcaggcaatcaagatcgacaaccacagaagcgggttggtaaaacgcgccaatcatgtttttgccaaggggatggttgacggcggttttcccgcccacggaagaatcaacctgcgacagtaaggtagttggtacctggatgaaacgtacgcctcgctggtagctggccgccgcaaaaccggtgagatcgccaatcacgccgccgccaagcgcgaccagagtggtatcacgaccatgcggttttttcagtaacgccgtaaacaccgtatccagcaccgtcaggctcttatactgctcgccgtcaggaagaatcacgctgtctacgttaacgcccgcccgttcgagtacgccgcgaaccttgtccagataaagcggcgccagggtttcgttggtcactaacatgacctgatcgcctgatttcagcggcaagaatgaagctggttcgttaaacaaaccagccgcgatggtgatcgggtaactacgttccccgagagtgactgtaatcctctccatgacgcgacatccaccttagttacttgtgcccgcttacccagcgtattctgcttgaattagttgctttccagcatatgaataatctggtttgccacaaccttagcgctttgatcgtcggtgcgaatggtgacgtcggcaatctcttcgtacagcggattgcgttcgttagccagcgcttccagaacttcgcgaggcggtgcttcaacctgcaacagcgggcgttttttatcacgctgcgtgcgcgccagttgtttttcgatggtcgtttcaaggtagaccacgacgccacgcgcggagagacggttacgcgtttcacgcgattttacagagccaccgccggttgccagcacaataccctgtttttccgtcaattcgttgataactttttcttcacgattacggaagccgtcttcaccttcaacatcgaagacccagcccacatcagctccggttcgtttctcaatctcttgatcagaatcgtaaaattccatattgagttgttgagctaactggcgcccaatagtgctttttccggcacccataggcccaaccagaaagatattgcgtttctctgccattttttcggtactactaagactattcgttaatggtaaacccgcttcacagacacccagcgcagcaggacatgaactgaaacctcataagatattgcgagagtcagactgaaaattatctcaatactcaagcgggtttggcaactgaataaatcaccaagcctgattgttgcaaaacccgagttagcgttgccgaatggcgaccagaacaacatatccggcctacaaattgctctactttcaaacaattgtgcgcaatccgcagaaccaatacgtctgcatcagcggacattcagccgtttatcatcggtcttatgcacaccttcggcaaggcaaagcgcattaatcaatgcgtaagcaacgaaaagcacgactctcaaatcggtactccttgtatgctaaatacatccgcacgtcaaatcccgcagatgcgttcagtgcaaaaacagcgcttttttatgcataaattattctgtcgccaccagtctgggggtgataaacaccactaattcgcgtcgctcgtcctctttgccgtcatggcggaagagctgaccaagccagggaatatcccccaacagcggcacgctatcgctacccgatttattttttcgcgaaaaaataccgcccagcgccagcgtctcgccgctttttacctctacctgcgtttcaatttcctgtttatctatcgccagcacttcgccgtcagcctgttgtagtacctgaccgggaacattctggctgatatgtaacttcaggcggatgcgccctttttgcaaaacggtgggcgtcacctccatccccagcaccgcttctttaaattccacggaggtcgcgccgctttcgccgctggaaacctgataaggaatttcgctgccttgcttgatactggctggctgcagatgggaagccagcagccgggggctggcgataatatccaactgctgcttttgctccagcgctgacagctccagatccagcaagcgtccgttaatgcgcccgatgttaaacccgacgcgtgaggtggcggcggcgacagataaatcactggaaagcgtcgtcacgtcacccaccgagcccgcttgcgtcgcgtcagccagcgtccactttacgcccagttcccgtagactcttttcgttaatggtaacgatatgcgccgccagctccacctgcgccaccggcagatccatttgcgatacccatttttccagctccgcaagggccgcgcggttatcgcgcaacagcatgcggttggtgcgcttatctaccatgatggttcccttcgcgctcaggagtttctcgcccgctttcgccagttcggcggcatcggcgtattgcaggctaatgctgcggttttccagcggtaaattagcctgaagccttaaccgctcggcatcctgccgcgcactgtgttctttctgccaggcctgtgaatgaacatggagaatattcccctcctgacgcagcaccagcccagcgctattgaccaccgtctgtagcgcctgtttccacggcacatccgtcagatgtagcgataatgtcccgctgacgtccggcgacaccaccagattctgccgctcctgttcggctaaagtctgcaaaacctgcaccacagggacgtcgtcaaccaccagcgtcactttcgccgcttttcccgcctgcgcggcgggcatcaaggctatcagtattatggctatccatcgcttcattgtccgctccctgacgtagccaccgccactgcggcggcgcacaatttttaccggtcgttaacgttaaggcttccgccgtcaggcggacaatcgtccaaccgttttccagcgtctgcccttcttccactcgtcgccatttttgctgactatctttaagaatgcctgtccatcgctcgcctttacgcaccgcgccctgataccgccactgcgagagttccgctatccggcagcgatcttccggcgggcggaagggatcgcgcattcctgtcaacatcagcaaacaaaaacagagcaatacactgcggctagccttcattcgccaggcgctccagttgcagcgtcatcaataattccgccccctctttacgcaatgaaaaccgacttacgctcatctcgctttcggccaaccggacaaacagcgacggcaccgcatcccaggacgttttcagcgccatttctcccccctgcgccgatggctgccagtgcagcaaacgcaggggaggcgcctggaaatctaacggcgaaaaaggacgcggattttccacggtgcgcccgaacagcggttcagccgcgacgctcagacggcgcagatgacgccactgttgccgggcggcctcgcgctgctggcttaaccgcgtttgttgcgtatgcagcgtcttccagccgggatagcccacagataacgtgaccgtcagcgtcaggcacagcacgcctgcacaccaaccaaaaacccgaccacggcgcgacatcccgtaccagatatcaaagagcgcgttcacgggcggcgctcctcgttaactgataatggaactgccagcgcccttgcgcatcctgctgcgtggcgcccgtgcggtttagcggaaaactgacatagtgacgaagcgatgtctcaagcgtgagcagggcgtcaaacgttctcgccagcccttccagctctagcgtctcttgctgataattgaggcttgtcagccatgcctgctctggcaacaggttggcaaggtcagtcaagatagattgccaggcttgcgtcagttcacgctgcgcctgacgttgtaatcgcgcctgttgctgccgctgacgctgctgcaactgcggtatgttcgccgcaagcgccgtcgtgtgtccgttttccgccgtcagtagcagttcattaatcctcccctcctgccaaaaaaccaaccgggcgatcgtcgcgaggcttgctatcagcagcagggacgcgccccataccacgcaccacagccgcagacgcgctacgtaatgttggcgccgccaggggagcaaattgacagaatgcgccatcagcgtatctcccctatggctaaacccagcgcaatcgcaaagcgataaccgtccggcggaaccggcggttggcggacggttacggcgcgccaggggtcgaattcgccctcggcgcataacgaaatatgttccggcacgacggataatgttgcggcaaggtcatgcagcgtcgtcgcctcgcgcgccgatttacgcccccacgcatagcgcgtcgcccacagccactggctctcatcgcgccagaccagacattgccgccccgaaggtataaacggcagcaagcgctgtaacgcgcaggcatcgggcgttacagcagcgatgcgcacattgagcgtttgcgccagcgttaacagcgctgaaatttctttgctttgcacggcggtaacgttgaacgcggggctcagcgcatcgtcctgaaagtcgaaacgcaataagtccggatccatatccagctcacgcgccatcgtttgtgaaagccatgcgacttgctcacgttcccgcagacgcatcggcggatgtggaaaagcgcgttgcaatgtccgatttgcgggaaaagagagataaatacggtgacgtagcggcagctcacggctccagggtcgcagtacgtgagccagcgattgcgggtcaggaatcgtaccctctgccgtggaggcgttcatcagcggcagtcgccaccaacgttgcagagaccagcccgatgcgccgcgaataacggcgatggccagcgcttcatgctgctgaatatgcaatcctatttgccaggttttaaaagccataacggtcgatctccttatcacccgtcgcgttaacgggtatatcaatgcgtctggcttgcctttatactaccgcgcgtttgtttataaactgcccaaatgacactaaatgggaaatctccagtgaagttcgtaaagtatttattggtccttgcagtatgttgcatcctgctgggagcaggctcgatttatggcctttatcgctatattgagccgcagctacctgacgtcgcgacattgaaagatgtgcgtttgcaaattccgatgcaggtttacagcgcggatggcgaacttatcgcgcaatatggcgaaaaacgtcgtattcccgttacgctcgatcaaattccgccggaaatgatcaacgcctttatcgccaccgaagatagccgcttttatgagcatcacggcattgacccggtaggtattttccgtgcggccagcgtcgcgctcttctccggtcacgcatcgcagggagcaagtaccattacccagcaactggcgcgaaacttcttccttagccccgaacgcacgctgatgcgcaagatcaaggaagcgtttctggcgattcgtattgagcagttgctgaataaaaatgagatcctcgaactctatctgaacaagatctatctcggctaccgcgcctatggcgttggcgcggcggcacaggtctactttggtaagacggtcgaccagcttagtctaagcgaaatggcggttatcgccgggctaccgaaagcgccttctacctttaacccgctctactcgatggatcgggcgatagcgcgccgtaacgtagtgctttcgcgaatgttaagcgagggatatatcactcaggcgcagtacgatcaggcccgtagcgaacctatcgacgcaaattatcacgcgccggaaatcgccttctccgcgccttatctgtcggaaatggtgcgccaggaaatgtataaccgttatggcgaaagcgcttacgaagatggttatcgtatttacacgaccatcacccgcaaagtgcagcaggccgcgcaacaggcggtgcgtaataacgtgctggactatgacatgcgccacggttatcgcggcccggcgaatgtgctatggaaagtgggcgaaacagcgtgggacagtaaaaaaattaccgatacgttgaaagcgttgccgacctacggaccgctgcttcccaccgtggtcaccagcgctaatccgcaagaggcgaccgctgcgcttgccgacggtacgtccgtttcgctacatatggaaggaatgcgttgggcgcggccttaccgctcggatacgcagcaggggccgacgccgcgtaaagttaccgatgtcgtccagacaggtcagcaaatctgggttcgtcaggtggataacgactggtggctggcgcaggtaccggaagtgaactccgcgctggtttcgcttaacccgcaaacaggcgcggtactggcgctggtcggcggtttcgattttaatcagagtaaatttaaccgcgcgacgcaagctttgcgtcaggtggggtcgaacatcaaaccgttcctctacaccgccgcaatggataaagggctaacgctcgccagtatgctcaacgatgtgccgatttcccgctgggacgccggggcaggttcagactggcgtccgaaaaactccccgccgcagtacgccggaccgattcgtttacgccaggggctggggcagtcgaaaaacgtggtgatggtacgcgccatgcgcgccatgggcgtcgactatgcggcggagtatctgcaacgcttcggcttcccggcgcagaatatcgtgcataccgaatcgctggcgctgggctccgcctccttcacgccgatgcaggttgcgcgcggttatgcggtgatggcgaacggcggtttcctgatcgacccgtatttcatcagcaagattgagaacgatcagggcggcgtgatcttcgaagcgaaaccgaaaatcgcctgcccggagtgcgatatcccggtcatttacggcaatacgcagaaatccgacgtgctggaaaacaccaatgtggaagaggtcgcggtttcgcaagagcagcaaaacagcgccgtaccgatgcctgagctggaacaggcaaaccaggcgctggtcgcgcaaaacggcacgcaggagtacgcgccgcatgtgatcaatacgccgctggcgtttctgattaaaagcgcgctgaacaccaatatcttcggcgaacccggctggatgggtaccggctggcgtgcggcgcgtgaccttaaacgtcgcgatatcggcggcaaaaccggtacgaccaacagctcgaaagacgcatggttctccggctatggtcctggcgtcgtcacttccgtatggatcggctttgacgatcaccgccgtgatttaggccgcactaccgcttccggcgcgatcaaagatcaaatctccggctatgagggcggcgcgaagagcgcgcaacctgcatgggacgcctatatgaaagccgtgctggaaggcgtgccggaacagccgctaacgccgccgccgggcatcgtcacggtgaatatcgaccgcagtaccggacaactggcgagcggcggtaacagccgtgaagagtatttcatcgaaggcacgcagccgacacaacaggcggtacacgaggtgggaactaccattattgataatggtgaaacacacgaactgttctgatcaaaaaaggcgctccggcgccttttttattgtgtttagcggatgacggcgaacggggagacgaactttccgttggcttgatcaacgccgcgccatcaggcaattcggccctgcgctttcaaccactcgcgtaccagaaacagcgcgctgacgttgcgggcctcgttaaaatcggggtcttctagcagatccattaaatgcgccagcggccagcgtacctgcggcaatggctcaggctcgtcgccttccagcgactccggatagagatcttccgccaccacgatattcattttgctggaaaaataagagggcgccatgctgagtttttttaagaaggtcaggttatgcgcgccaaacccgacctcttctttgagctcccggttcgccgcttcaaaaacggtctcgcccgggtcgatcaatcctttcgagaagcccagctcataggattcggttcccaccgcatactcacgaataagaatcagatgctcatcaacgatcggcacaatcattaccgcctcacgggttgatggtcgcatacgttcatacacgcgacgcacgccgttgctgaactccagatccacgctttctacgttaaacagtcgggattgtgcgacggtttccactttcagaatggtgggtttttgtaatgatttgctcattgtgagaatctttgcagtgtaatctgtggtcattgtgcgacataccgcacggtttcggcaatgcgaattgccgtttatttacatttatgtaacgtaataaaaattaattcttatttcaaattaaaagtcaataggttgaaataactccaggaatttgctgatattccgtttttggtggtattgctatgatttgccttcactgggatgcgctttacaatgctcaagttcaactccacgcttgccgatagccaaccacagaaaaatgtttattggacagggtgcgactgaccacgcctgacagacttagtaagatggggaaagcatgagcaccattctgatttttatagctgctttgctggcctgctctctactggcaatatggcggttccgggtaaagtccagacgagggagtttaccgtggatcagcgcctttcaggacgcgcaaacgcgtaaactgttgcccgaagagcgcagcgcggtagaaaactatctcgataaccttagccagatccagcaagttccggggccgacaggcgccagtgctgcgcccatctcgctgacgctgaacgcggaaagcaacagtgtcgtgatactgacccactccatcacccgctacggcattaccactgacgatcctaataaatggcgctactacctcgactccgtcgaagtccatctgccgcctttctgggaacagtacatcaatgatgaaaacaacgttgagctgatcctcacggatacgctgccgctggtgatctctttaaacggccacacgctgcaagagtatatgcaggagtcgcgcggctacgcgctacagaatacggcctctacgcaggcgtcgattcgcggcgaagagagcgagcagattgagctgttgaatatccgtcaggagacccacgaagaatatgcgctcagccgcccggctggcttgcgcgaagcgttgttaatcgtcgcctcctttttgttattctttttctgtctgataacgccagacgtttttgtaccgtggatgataggcggcgctatcctgctgctggcagccggactttggggactttttgcgccgccgtcgaaaagcgcgctgcgggaaattcactgtttgcggggaacgccccgccgctggggactgtttggggagaataatcaggagcagattaacaatatttcgctgggcatcatcgaccttatttaccctgcccactggcaaccctacattacgcaagatcttgggcaacaaacggatattgatatttaccttgatcgccatgtcgcgcgccagggccggtttttatccctgcatgatgaagtgaaaaacttcccgttgcagcactggttacgcagcactgttattgctatcggttcgctgctggtgttgtttatgctgctgttctggatcccgctggatatgccaatcaagttcacgctatcgtggatgaaaggcgcgcaaaccattgaagcgacaacggtaaaacagcttgaaaaggctggcgtacgggtgggcgatacgctgcacctgagcggtaaaggaatgtgtaatattcattccggcgcgacctggagcggccagtctaactcaccgtttatgccgttcgattgctcgcaaatcatctggaatgacgcgcctgcgctaccgctgccggaatcagacctggtgaataaagcgatggcgctaagccaggcggtaaatcgtcagctccatccaaaacccgaagacgactcgcgcgtaagcgcatctttacgctccgcgatacaaaaatcgggcatggtattattagatgactttggcgatattgttctgaaaaccgctgatttgtgcgcggcggaagacgagtgcgtgcgcctgaaaaatgcgctggttaatctcggtaacagtaaggactggaacgcgctggtgaaacgcgcgaacgccggcaaactggacggcgtcaacgtgctgctacgccccgtaagcgcagagtcgctggaaaatctggtcacgacctcaacggcgccgtttatttctcgcgagaccgcgcgtgccgcccagtcgctgaatagccccgctcccggcggattcctgatcgccagcgatgaaggcagcgaactggttgatcaggcctggccgtcaacgccgctgtatgactatcccgcgcaggaacagtggagcgccttccagcgtctggcgcaaacgcttatgcagacgccatttagcgccgagggcattgtcaccagcgtgtataccgatgccaacggcacgcagcatatcagcctgcatcgtatccccgataaatccggctggtggcgttacctcggcaccacgctgctgatgctggcaatgatagtgagcgcggtctacaacggcattcaggcgttcagacgttatcaacgccaccgtacccgtatggcggacatccaggaatactatgaaagctgtctcaatcccaggttaaccgtctctccggaaaatctcatctgatagcgccgccgtgcgacagggtatgctaccctgtcgcgcaaattgcgttaccctggagttccccatgcatattgatattgactggcaaaacgtggataccgttttgctggatatggacggcacgctgctcgatctcgcgttcgataactatttctggcaaaagctggtaccggaaacctacggcgcgcagcagggtatttcgccgcaggacgcgcaggaatatattcgccagcagtatcatgccgtacagcatacgctaaactggtactgtctggattactggagcgagcgtctgggtctggatatttgcgccatgacgacggcgcaagggccgcgcgccgttttgcgcgacgataccgtaccgtttctgaatgcgttaaaagccagcggaaaacgtcggattctgctcaccaatgcgcatccacataacctggcggtgaagctggagcataccggtctggcctcacaccttgatttattactttccacccacacatttggttatcccaaagaggatcagcggttatggcgcgctgtcactgaggaaacgggaataagcgcagagaaaacgctgtttatcgatgacagcgaaccgattctcgacgccgccgcccggtttggtattcgctactgtcttggcgtgacgaatcctgattccggcctggcggaaaagcactatacgcgccatccgtccctgaacgactaccgccgtctgatcccctcgctgatgtgaaggagacgccatgaaagaaaagtcctccgttgaggtcagactggataaatggctgtgggccgcgcgtttttataaaacccgcgcgctggcccgcgagatgattgaaggcggtaaggtgcattacaacggccagcgcagtaagccgagcaaaatcgtcgagctgaacgcaacccttaccctgcgtcagggaaatgacgaacggacggtgatcgttaaagccatcaccgaacagcgccgtccggccagcgaagccgtcgctctgtatgaagagacggcggaaagcgtggaaaaacgcgaaaaaatggcgcaggcgcgcaagcttaacgccctgaccatgccgcatccggacaggcgaccggacaagaaagagcgccgcgacctgttacgatttaaacacggcgacagcgaataactgtcacccgcaagagagatgattatgccgcaacatgaccaattacatcgttatctgtttgaaaactttgccgttcgcggcgagctggtgaccgtttcggaaaccttgcaacagatcctcgacaatcatacctacccgcagccggtgaaaaccgtactggccgaactgctggtcgccactagcctgctgaccgcgacgctgaagtttgccggcgacattacggtacagctccagggcgacgggccgttaagcctggcggtgatcaatggcaataatcagcagcagatgcgcggcgtggctcgcgttcagggcgacatccctgacaatgcggatctcaaaacgctggttggcaacggctatctggtgatcaccattacgccggaagagggtgaacgctatcagggcgtggtgggtctggaaggcgatactctggcggcgtgcctggaagattacttcctgcgctccgagcagttgccgacgcgcctgtttatccgtaccggcgatgtcgacggtaaaccggcggcaggtggaatgttgcttcaggtgatgccggcacagaacgcgcaggcggaggatttcgaccatctggctatgttgacggaaaccattaaaagcgaagagctgctgacgttaccggcaaatgacgtgctgtggcgtttgtatcacgaagaagaagtcacactctacgatccgcaagatgttgagttcaaatgcacctgttcacgcgaacgttgcgcgggcgcgctgaaaacattgccggatgaagaagtggacagcattctggcggaagaaggcgaaatcgatatgcactgcgattactgcggcaatcattacctgttcaatgcgatggatatcgcggagatccgtaacaacgcctctcctgccgatccacaggttcactaatcgcctcgtagtcagcaacgtcattgcctgatggcggcgcttatctggcctacagcatcccgctccgtaggccggataaggcatttatgccgccatccggcaaaaagcttactcgttgtagtaatccacatccaaccgctgaccatcaacaatgatatcgcgccaggctttgggggctgagtctaaccgatgcccggcaatcgcgtgcaacagttgcgtcttagaaaacccgtccggcaatcgggcgaacgctttctgcgtccatttcccctcttttaagccgtagacctggctctcggcaacaataaagttatacagcacctgctcaggctgaccgtcgccgttaagatcctgactcaccagaacgcaggcatccggttcaaggcaggaatcgtccgaataactctgctctttgacaaacgcccaaaatgcagcatccggcttctggctaccgggcgcaatcatcaccacccgcgctaaatcgtccgccgtcggagagaccttatttctctgcaaaaacgtcatcagttcacgattgcgctttctgttctgcgtaaacgcctcgtcatcccgcaacgatttcaacgcttcctggccaggtttgccgctgtgatccagcatatacaggctgatctgatccgcagtaattttaccgctatggtaacgcgccatatggctgttgacgctaatacgccagacatcaagtacaggcgaggccagcaacagcaatatcaccagcgtcaacaaagagacgctcagtatcaccttgccttgccactcaccagggtcgcgtccgcggcgtaacagaccgatcagataaccgaaggaccataccagcaagacagacgccgtcagcgcgccatacagacgatccggcgtccagccgtattgctgaatacgtacccataacgcccagcccgccagcagcatatatatcggggcaacgcacagcgaggcgctaatcatgccgcgtagtacgcgcggatagggtaatatgcgcttttgcggttcattgacaatcgccacgaggagcagcagcatcagcgtcagcgtggatagcagccccgcagcggaaacacgcgcagaaatcgcctccagtccggtaaagggtaacgtcacaataaacagcaatgccagcagcgacaccaccggcagtaaacccgtcgcgatcagcgtcagcagcttttgcaccgccgccacaaggcgcgactgcgtgcgggcgagaatgaccgccagcgccgtaatcaagccgatggtcacataaataaaggcttcagtttcaaagaaaagggtgctgaaaaagcggatgcccaccagcctgaatagcgcgctccagagcaggagaaccagccagaacagtccgttggcgaccaggacgataaacaatgtcagtacgttatgccataaccgcatataaaactggggataacgcgccgaaccggtttgcgaatgtaactgatattgcatccagggtaagaccagcatcgccatcaacacaagccggagaccatacagccagaggagctcggccaggcgccatttctccaccgtctcaacctgccatttcagccagccgctcattgccagcacgaccacaaaggtcagccccagccagccccacagcgcgcgctgtttaaaagaaaccacggtaagcaatagcattgacgacaacgctatcgtcgcaggcataccatagaacagccagtcgctattttgtggtaccagccaggccatcagcaggtagcacaagacgccctgcagcaaaccggtgagcaacataccccagcgagtagtacgtgaaagcgctacactttccatgtcgttatccagaatgatgagaaagtcgcattattgcatcatctgttcaccgccaggcgtcgtcatgcataattcagaaaaaaacgcagagaggtgaatcgatattgttaatgttggtgttacgtaactttcttacatgaatgcgattacagtcacattatgtcggtcaaaaacacttccttttaacgttttcagaacattttccacaacaaaagtaggtttcctgccataataaccgccgctgcgtgacaggagtcacagtgtttttcgtcaatcgtgattttgtccagatacgtaaatctatgagccttgtcgcggttaaccaacctcaaaaaaccttactattttcggtaatatatattggctaaggagcagtgatatgcgcgttaacaatttaaccccgcaagatctcaaggcttatggtatcaacgacgtccaggatatcgtttacaatcccagctacgacaccctttatcaggaagaacttaatcctggtctggaaggctatgagcgtggcgtgttaactaacctgggcgctgttgccgttgataccggtatttttaccggtcgttcgcctaaggataagtatattgttcgcgacgacaccacgcgtgatacgctgtggtggtccgataagggtaaaggtaaaaacgataataagccgctttcccaggaaacctggcaacacctgaaaggtctggtgacgcatcagctttctggtaaacgcttattcattgttgatgcgttctgcggcgcaaatgccgatacgcgtctttccgtgcgctttattacggaagtcgcctggcaggcccacttcgttaaaaatatgttcattcgcccaacggacgaagagctggtaggcttcaaacctgactttattgtcatgaacggcgcgaagtgcaccaacccgcagtggaaagagcaaggactgaactcggaaaacttcgtggcgttcaacctgactgaacgtattcagcttattggcggcacctggtacggcggcgaaatgaaaaaagggatgttctcggtaatgaactacctgctgccgctcaaaggtatcgcctcaatgcactgttccgccaacgtgggtgaaaaaggcgatgtcgcggtcttcttcggcctttccggtaccggaaaaaccactctgtccaccgacccgaaacgtcgtctgattggcgatgatgagcacggttgggatgacgacggcgtgttcaactttgaaggcggctgctacgccaaaaccatcaaactgtcgaaagaagcggagccagaaatttatcatgcgattcgccgtgatgcgttgctggaaaacgtcaccgtgcgcgaagacggcaccgttgatttcgacgatggttccaaaaccgaaaacacccgcgtctcttacccgatctatcatatcgataacatcgttaagcccgtatccaaagcaggtcacgccacgaaggttatcttcctgacggcggacgccttcggcgtgttgccgccggtttcccgtttaaccgctaaccagacgcagtaccacttcctgtcaggtttcaccgctaaactggccggcaccgaacgcggcgtcaccgaaccgacccccaccttctccgcctgcttcggcgccgcgttcctgacgctgcacccgacgcagtatgctgaagtgctggtgaaacgtatgcaagcagcgggcgcgcaggcttatctggttaacaccggctggaatggcaccggcaaacgtatctccatcaaagatacgcgcgcaattatcgacgccattctgaacggttctcttgataacgcggaaaccttccgtctgccgctgttcgatctggcgatcccgactgaactgccaggcgtggatacccacattctcgacccgcgtaacacctacgcgtcgccggaacaatggcaggaaaaagccaccgcgctggcgaaactgttcattgagaacttcgagaagtatacggataccccggcaggcgaagcgctggttagcgccggaccgaagctgtaaggaacaggccggatggcggctttgaacggcgtcatccggcgttgagaagaaagggagggtaatacctccctttcttatgcctcttttgtcgtcccctggacgcgagccacaggaaccggtagccaggcgcgaattgacaatccgccacgctcgctggtgccaatctccagcatcccgttatggttatcgataatgcgctgcacaatcgccagccccagccctgtgccgctggtgctacgggcgctgtcgccacgcacaaaaggctggaacagatgtttacgctgctccggcttaatgcccggcccgtcatcttctacctgaaaccaggcgcgatgcgactcggtgccgctgctgaccttaatccagccgttgccatagcgggcagcattgaccaccatattcgccaccgcgcgcttaatcgagagcgggtgcattttcacctggatgctgcctgcctgaagcgcagtgttaatctcacgctcatagccgctttccgccgcaatcacctcgcccagcacggaattgagatccgccatctccattggcatttcctgaccggtacgcagatagtcaataaactgttcgataatggcgttacactcttcgatgtctttattgatcgactccgcgagataaccgtcttcctcgcccatcatctccgtcgccagacgaatacgggtcaacggcgtgcgcaagtcgtggctgacgcccgccatcaatagcgtacggtcatcggccaattgcttcacgccggctgccatatggttaaacgcccgggtcacagagcgcacttcagaggcgccatattcacgcagcggcggcggaataattcccttccctacctgcaaggcggcatgttcaagatccactaacggtcgattctgtatacgaataaacagccacgcgccgcctatcgccaggagcatgatcgccagcgtgtaacggaaaagcggagaaaaatcgccctgatgaatctcggtcagcggcacgcgcacccagatattgggcgacagccaggttttgagccacacgacgggcgagcttttgttgacctcaacgcgcacttccgtcgggccgcctaattgctgcgccatctggtggcttaagaattcgtagtgttgcgcccaacgcagcccggcctcttcagcggcttcgttggtgtagagagagatccccagctcgcgatagatttcccgacgaaacgcaggcggcacgactaactgcgtgccgtcctccagttgcagcttatcggtcatcagcatacggacttcgtaagccagaaccttattaaactgctggaggctcggcaaaatcgcgaagttcagcaccaccaggtaggtcgtcaccaggctgacgaacagcaaggtgacgatgagcaacagcgtgcgggcaaatgaacttcgcggcgagaagcgcattcgcctcatgctttagaaccgtccggtacgaagacgtagcccaggccccagacggtctgaatataacgcggatgtgccggatcttcttccaccatacggcgcaggcgggagatctggacgtcgatggagcgttccatcgcggaatactcgcggccacgggccagattcatcagcttatcgcgagagagcggctcgcgcggatggctgactaacgctttcagtaccgcaaactccccgctggtcagcggcatcggttcatcttcacggaacatctcgcgcgtaccgaggttcagtttaaacttaccgaacgcgataacggcctcttcctgcgacggcgcgccgggcagttcgtttgcctgacgacgtaacacggcgcgaatacgcgccaacagctcgcgcgggttaaacggtttaggaatgtagtcatcggcgccgatttccagcccgacgatacggtcaacctcttcacccttcgccgtgaccataatgatcggcattggattactttgactacgcaggcgacgacaaatcgacagaccatcttcacctggcagcattaaatccagtaccatgagatggaaagattcacgggtcagcagacgatccatctgctcagcgttagcgacgcttcgaacctggaagccctgctcggtcagataacgttccagtagcgcccgcagacgcatatcgtcatcaaccaccagaatcttataattctcttgcattgtctgtactcccaaaggttcgcaacaaatgtaagtgtgtattcttaaaaaagctcacgtgagtcaccagcaaattctggtatgaatttcaggctaaattgttacaaagcatatttaacagcagcttaaatatacaattaatcggcaaccccattatttattctgtcgggacgatcacgttataccccgtgtgcgcaatatcgacagcaaaggtaaatcaacgagatgaaaacgcccctgatcacccgcgaagggtacgaaacactcaaacaagagctcaattatctctggcgtgaagagcgcccggaggtcaccaaaaaagtgacctgggctgcgagtctgggcgaccgcagcgagaatgccgactatcagtataataaaaagcgcctgcgtgagatcgacagacgcgtcagatatctgaccaaatgcatggaaaatctcaaaatcgtggattattccccgcagcaggagggcaaagtcttcttcggcgcctgggtggaaattgaaaatgatgacggcgatacgctgaagttccgcattgtcggctacgatgaaattttcggacgtaaggattacatctctatcgactcgccgatggcgcgggcgctactgaaaaaagaagtgggcgatctggcggtggtcaacacccctgtcggcgaagcaaactggtacgtcaatgcgatcgaatacgtcaaataagacaagaagaatcctaagcccccgctgatggctggcatttttgccagccaatccgtataactatcccctgatttttatcctgaagacgaagctaacccatgatgaatgattctttctgccgcattattgcgggtgaaatccaggcaaatgccgggcaggttgaagctgccgttcgcctgcttgacgaagggaacaccgtgccgtttatcgcacgttatcgtaaagaaatcaccggcggtctggatgacacgcagttgcgtaacctggaaacgcgtctgggctatctgcgtgagctggaagacaggcgtcaggctatcctcaagtccatttccgaacaaggcaaactgaccgatgagctggctggcgccatcaacgctacgttaagtaagaccgagctcgaagacctctacctgccctataaacctaaacgccgcacccgtggacaaatcgccattgaagccggccttgagccgctggccgatctgctctggaacgagccgtcccacgatcctgacgtggaagcggcaaagtacattgatggcgacaaaggcgtggcggacacgaaagccgcgctcgacggcgcacgctacattctgatggagcgctttgccgaagacgccgcattgctggcgaaagtgcgtgattacctgtggaagaacgcccatctggtcgccacagtcgtgagcggcaaagaggaagaaggggcaaaattccgcgactatttcgaccatcatgagcccattgctaacgtcccgtctcaccgtgcgctggccatgttccgtggtcgtaacgaaggcattctgcaactttcgctcaatgccgacccacagtttgatgagccgccgaaagagagctactgcgagcagatcatcatggaccatctcggcctgcggctgaataacgccccggcggatagctggcgcaaaggcgtagtgagctggacgtggcgtatcaaagtcttaatgcacctcgaaaccgaactgatgggcaccgtgcgcgaacgtgcggaagacgaagcgattaacgtgtttgcgcgtaacctgcacgacctgctgatggcagcccccgcaggcctgcgcgccacgatgggccttgatcctggcctgcgtaccggcgtaaaagtcgctgtcgttgacggcaccggcaagctggtggcgacggataccatttatccgcataccggtcaggcggccaaagcggctaccgtgatcgccgcgctgtgcgaaaaataccacgtcgaactggtcgcgattggcaacggtacggcctcgcgtgaaaccgaacgcttctatctcgacgtacagaaacagttcccgaacgtgacggcgcagaaagtgatcgtcagcgaagcgggggcgtccgtgtattccgcttctgagctggcggcgcaggagtttccggatctcgacgtctccctgcgtggcgcggtctctatcgcgcgtcgtctgcaggatccgctggcggaactggtgaaaatcgatccgaaatcgatcggcgtcggccaatatcaacacgatgtcagccagacgcagctggcgcgtaagctggatgcggtggtcgaagactgcgtaaacgccgtcggcgtcgatttgaataccgcctccgtgccgctgctgacccgcgtcgcgggcttaacgcgcatgatggcgcaaaacatcgtcgcctggcgcgatgagaacggtcagttccagaaccgccagcaactgttgaaggtgagccgtctggggccgaaagcgtttgagcagtgcgcgggcttcctgcgtattaaccacggcgataacccgctggatgcctccaccgtccacccggaagcctatccggttgtcgaacgcattctggcggcgacgcagcaagcgctaaaagatctgatgggcaacagcaacgaattgcgtcacctcaaggccgctgattttaccgacgataaattcggcgtgccgaccgtgagcgatatcatcaaagagctggaaaaaccgggccgcgacccgcgtcctgaatttaaaaccgcgcaattcgccgatggcgtcgaaaccatgaacgacctgctgccggggatgattctggaaggggcggtcactaacgtcactaacttcggcgcgtttgtcgatatcggcgttcatcaggatggcctggtgcatatctcctcgctctcgaataagttcgtcgacgatccgcacaccgtggtgaaagcgggcgacatcgtgaaggtgaaagtgctggaagtggatctgcaacgtaagcgtattgcgctgacgatgcgtctggacgaacagcccggcgaaaccgccgctcgccgcggcggcggcgccgatcgcgctcagggcaaccgccctgcatctaaagcggcgaaaccgcgcggtcgtgacgcccagccagccggtaacagcgccatgatggacgcgctggcagcggcaatgggaaaaaaacgctaatcgggtaatacgcaggccgggttacttcttatccggcctgcgattttgcaatacgtccaaccctttcttttttaattaacaattaaatcttacccattagaatctgttaattaatttccttctgctatccgcactattaattatcactttattaacagatgaaaccttaattaaacattaaaaacggtgaatatttgcacattaggggtatttgcaaaaagacaaataaatgttgagccatatcaacatcggcgcaaattatcgcttatttgtacattccgtcacattttaatcgttgaagatagaaaccattctcattatcattgtgttgttgattatttactctttccttcgttggctaaacatcgggtctcctgccgcccccctgagcgccgcatgaggtatacatccagttagtaagaaacaagtaggtcgtatgcaattcactcctgacactgcgtggaaaatcaccggctttgcgcgtgaaatcagcccggcgtatcgtcaaaaactgctttcgctcggcatgttgcccggctcttcatttaatgttgtccgcgtcgcgcccttaggcgatccgatccatatcgaaacacgacgcgtgagtctggttttgcgtaaaaaggatttggcgttaatagaagtggaagcggtttcctgttaatacagtgagtctataaaaatgaaaaaattaaccattggtttaattggtaatcctaattccggcaagaccaccttatttaaccaactcaccggcgcgcgtcagcgcgtggggaactgggcgggcgtcaccgtcgagcgtaaagagggccagttcgcgacaactgaccaccaggtcacgctggtagatttacccggcacctattctctgacgaccatctcgtcacaaacctctctcgacgaacagatcgcctgccactacatcctgagcggcgacgccgacctgttgataaacgttgtggacgcctccaatctggagcgcaacctctatttgacgctgcagctgctggagctgggtatcccctgtattgtcgcgctcaacatgctggatatcgccgaaaaacagcaggttcgtattgatgtcgacgctctgtccacgcgtctgggttgccctgtcgtaccgctggtatcgactcgcggccgcggtatcgaggcgctgaaactggccattgaccgtcacaacgctaacgacaacgtcgaactggtgcattatgcccagccgctgctgcgcgaagcaggtttcctggccgacgcgatggcccaggagatgcctttacaacagcgccgctggctgggtctgcaaatgctggagggcgatatctacagccgggcttacgcagatgaggcggcgcaaaacctggacacctcccttgcccgtctgaaggacgaaatggacgacccggcgctgcatatcgccgacgcccgttatcagtgtatcgccgctatttgcgacgtggtcagcaataccctgacagccgaacccagccgcttcaccagggcggtcgataaaattatcctgaaccgcttcctcggcttaccgatttttttgttcgtgatgtacctgatgttcctgctcgccattaacatcggcggcgcgttgcaacccctgtttgatgccggttccgtcgccatctttattcatggcattcaatggattggctacacgctgcacttcccggattggttaaccatcttcctggcgcaaggtcttggcggcgggatcaataccgtcctgccgctggtgccgcaaatcgggatgatgtacctattcctctccttccttgaagactccggttatatggcgcgcgcggccttcgtcatggatcgcctgatgcaggcgctgggactaccgggtaaatccttcgtgccgctgattgtcggcttcggctgtaacgtaccttccgtgatgggcgcccgcacgcttgacgctccgcgcgaacgcctgatgaccatcatgatggcgccgtttatgtcctgtggcgcgcgcctggcgattttcgccgtctttgccgccgccttcttcgggcaaaacggcgcgctggcggtcttctcgctgtacgtgctgggtattgtcatggcggtattaaccggcctgatgctgaagcataccattatgcgcggcgaagcctctccgtttgtgatggagctaccggtttaccacgtaccgcatatcaagagcctgatcatccagacctggcaacgcctgaaaggttttgtactacgcgccggtaaagtcattatcatcgtgagtattttcctgagcgcgtttaacagtttctcgctgagcggcaaaatcgtcgataacattaatgactccgccctcgcctccgtaagccgggtcatcacgccagtctttaaaccgatcggcgtccatgaagataactggcaagcgaccgtgggtctgtttacaggcgccatggcgaaagaagttgtcgtcggtacgctgaacacactctataccgccgaaaatattcaggacgaagcgtttaatcctgccgattttcacctcggcgatgaactgctgggcgcggttgacgatacctggcaaagcctgaaagacacctttagcctgagcgtactggctaacccgatcgaagcgagtaaaggcgacggcgaaatggcaaccggcgcgatgggcgtgatggatcaaaaattcggcagcgccgcggcggcgtacagttacctgattttcgtcctgctttacgtaccgtgtatctcggtaatgggcgctatcgcccgcgagtccagccgcggctggatgggcttctccatcctgtgggggctgaatatcgcctattcgctcgccacgctgttctaccaggttaccagcttcagtcaacacccgacatacagcctgatctgtattctggcagtgatcgtctttaacgttgtggtgttaagcctgttgcgccgcgcccgcagccgtgtagacattgaactgctggcaacccgcaaaaacgtcagttcctgttgttcgggcactgcgggcaattgtcactaagggatgtaaaaaatggcttcattgatacaggttcgcgatctactggcgctacgggggcgtatggaggcaacgcagatcagccatacgctgcacgctccgcagcccatgatcgacgccatgctgaatcaactggagatcatgggtaaagcggtacgtatcccggaagaagcggacggctgcctttcaggcagctgtaaaagttgtccagaaggtaaagcctgcctgcgcgaatggtgggccttgcgttagccttcgccgggtagcgacgtaacgcgtcttatccggcctttatcccgcgttatgttgcccggtacgcgtcacgctgccgggcaattttgcgtcatgccttccacaaagatgaaagcgttaccgccgtgcgcatttatctccccacgcgcctcgcaagcgcgctaatcctctactgcaatcagcccggtctgcgcgtagtgtcacgccattgaacttcaccgatgacggatcgatatggcgacctcaacaacatccacgccgcatgacgcggtattcaaacagtttctatgccaccccgatactgcacgggattttttggaaattcatctcccgacgacattacgtcaaatctgtaatctgaatacgttacggctggagtccggtagctttattgaagaggatttacgcccccattattccgatattctttggtcgctggaaacaagtgaaggtgaaggttacatttacgtggttattgaacatcagagtacgccggacgcgcatatggcatttcggctgatgcgttacgcaatggctgcaatgcaacggcacctggaggccgggcataagacgttgccgttagtggtgccaatgctgttttatcacggaaaccgcagcccgtatccgttttcattatgctggctggatgaatttgccgacccggtgatggcgcgtaagctatacgccaccgcctttcctctggtcgatattacggtcgtgccggacgacgagattatgcggcaccgacgggtcgcgctgctggaactcatacaaaaacacatccgccagcgtgatctgatggggcttgtcgaacagctggtcgccctgctggttaagggatacgctaatgacacccagcttcaaagtttgtttaattacatgatgcacactggcgacgccgcgcgcttcaatacgtttatccgccaggtggctatgcgtatcccacagcataaggagaagatcatgactatcgcagaaagattacgtcaggaaggacatcgtaacgggttacagaaagggctacagcaaggcaagcaggaaggccaacggctcgccgcattgcgcattgcccgctcgatgctaaacgatggtttcgatcgcgataccgtgcttagggttaccgggctggcgcctgccgatctggcgtctgaaaaccattaatctggcagaatggtccgggcccggcaacgccctggttacagcgatgattttagcgtcatcagcgcctgacaaaacgccgccggatgcgagataaacggcgcatgggccgccttcgccattatctgtgatgtactgtgcggccataacgtatcgagcaaaggcgcgattttacgcggcaccagaccgtccagataaccatacaaacgcaaaaacggcatgttcacatttttaagcgcttctcgtagatcgaccgtttttaagatttccagtccgccattgagcacctctacatccggcataggctgcgccagcactacgctttttaaggtgcgggcatcctgacgcgccgtctccgtccctaacgtttgcagcgccagaaaacgctccaccgtgcgctgaaaatcgtcgctaagctgctgctggaatccgccgaggatttctggttttattcccggccacccctcacgcgcgctaaagcatggcgaagaggcgactgtcaccagcgcctgaacgcgttcagggtgggtgagcgccatctgactcgccaccaggccgcccaggctccagccaagccagatagcctggtccggcgcgtttttcgctacctgcgccgtcatctcttcaagcgtcatggcgccaaaccccgagctgcgaccatagcccggcaagtcgaccagatgcagcgtaaaatgcgagccgagttcctcgcgaatgcaatgccatacctccgcgttcaatccccatccgtgcagcagcacaagatgacaatttccctcgccgtaggtctgccaccagatgtcattcatcagttactgttctcttttgtctaacaaggatgcacctatgctaacagtaccgggattatgctggctatgccgaatgccgctggcgttaagccactgggggatttgttccgtatgcgcgcgcgccgtccgccagcgcgtcagcgtgtgtccgcaatgtggattacccgccaggcatccttcgctcccctgcggtcgctgcctgcaaaaaccgccgccctggcagcgtctggtgagcgtcagtaactatacgccgcccttgagtttactggtgcatcagcttaaatttacccgccgtaacgaaattgccgccgctctggcgcgtctactgttgcaggaagtcctcatggcgcgccgcagcactggcttgcagcttcccgacagaatcgtcagcgttccgctctggtcgcgccgacactggcggcggggatttaaccaaagcgatctgttatgccaaccgttagcgcactggctgggctgcgcgtgggacagccagaccatcacgcgggtacgggcgaccgcaacacaacatcatctcagcgccaggttacggaaacgcaatttgaaaaacgcgtttcgccttgaattgccggtacagggtctccatatggttattgtggatgatgtcgtcactaccggaagtaccgtcgcggaaatcgcgcaactgcttttgcgcaacggcgcagcgactgtccaggtatggtgcctgtgtcgaaccttgtagagcctcgatgatgggcgtattataaccaactaaaatagtcaactattaggccattactatgatccgtatttccgatgctgcacaagcgcactttgccaaactgctggcaaatcaggaagaagggacgcaaatccgcgtatttgtcattaatcccggcactcctaacgcagagtgcggcgtttcttattgtccgcccgacgccgtagaagccaccgatactgcactgaaatttgacctgttgaccgcttatgtcgacgagctgagcgcgccctatctggaagacgcggaaattgatttcgtgaccgaccagctaggttctcaacttacattgaaagcgccaaacgcgaagatgcgcaaagtggccgatgacgcgccgctgatggagcgcgtggaatatgctctgcaatcgcagattaacccgcagttggcgggccacggcggtcgcgtctcgctgatggaaattaccgatgaaggctatgcaattctgcagtttggcggcggttgtaacggttgctcgatggttgacgtcacgctgaaagaagggatcgagaaacagttgctgaatgaattcccggaactgaaaggggttcgcgatctgaccgaacaccagcgcggcgagcactcctactactaagattttccccgcatccatgcccgatggcgcttgcgcctgtcgggccttgtctgccccaccgtaggccgaataaggcgtttacgccgccatcctgcgctatcagccacaactcagaacgatggtccttctcctttcaccgataacatgacctgtgtctcataatttaaattttgcctgccagggtcattttcaacacccacatgttacccgtatcattcttatgggcacctaacatccatataacatctgactacgctcattcgtttcaacggtaatcagtattggtgctattgcgactctgttcccgtcgggaacaacaggaatttgtcgtcgaaacaatgacgttacccataacaaagtaaaggccaggtaaatcatgccattagtcatcgttgctatcggtgttatcttgttacttcttctgatgatccgcttcaaaatgaacggatttatcgcccttgtcctggtagcgctcgctgtcgggttgatgcagggaatgccgctggataaagtcatcggctccatcaaagccggtgtcggcggtacgcttggcagtctggccctgattatggggttcggcgccatgctgggcaaaatgcttgccgactgcggcggcgctcaacgtatcgccactaccctgatcgcgaaatttggtaaaaagcatattcagtgggccgtagtgttaaccggctttaccgtcggcttcgctctgttctatgaagtgggcttcgttctgatgctgccgctggtattcaccattgccgcagcagcgaatatcccgttactgtacgtcggcgtgccgatggccgcggcgctttccgtcacacacggcttcctgccgccgcacccgggcccaaccgcaatcgccacgattttccatgccgatatgggtaagacgctgctgtttggtacgattctggcaatcccgaccgtgatccttgccggaccggtttacgcccgtttcctgaaaggtatcgataagccgatcccggaaggcctgtacagcgcgaaaacttttacggaagaagagatgccgggctttggcgtcagcgtctggacgtcgctggttccggtgattctgatggcgatgcgtgcgattgccgagatgattctgccaaaaggccacgctttcctgcccgttgccgagttcctgggcgacccggtaatggctacgttaattgccgtactgattgcgatgttcacctttggcctgaaccgcgggcgttccatggatcagattaacgatacgctggtctcttccatcaaaattatcgccatgatgctgctgatcatcggcggcggcggcgcattcaagcaggtgctggtagatagcggcgtggataaatacatcgcttcaatgatgcatgaaaccaatgtctctccgctgttaatggcgtggtctatcgcggcggtgctgcgtatcgcgctgggctccgcgactgtcgcggcgattaccgcaggcggcattgcggcgccgctgatcgccactaccggcgttagccctgaactgatggttatcgcagtcggttccgggagcgtgattttctctcacgtcaacgacccgggcttctggctgttcaaagagtatttcaatttgactatcggcgagaccattaaatcctggtcgatgctggaaacgatcatctccgtctgcggcctgatcggctgtctgctgttgggtatggtggtttaagcgagacagcttgtaggccggataaggcagcaatgtgcgccaggattgcctgatggcgctgcgcttatcagacctacgtgctctcaccataataaagccggggaaatccccggctttattacttcttcttcgcggccgcttttcggcgcttatccaaatccttaatcagcttgtttacgccctcatcggcaaacatctgctccagcgtggcggtgagcttccgccgccagtttttatactgatcgctggtgcccggtacgttaaccggatcggccatatccagccagtcctccggctgaagccccaatagaccgctgttactgtcggcgatatagcgctgaagtccgcgatttagcgttggcgtcatcgacattaacgatgccttatgcccggcgcgttttggcagacagccatatttatgcagcgcgtccaatagcccctgtttcgcccgctcgcgatcctcatacagcccgcgcagaatcacttcatccggataaagccccagagctttacccaacgtcaggtcaccgcattcccaatagccgcgcagcgtggggagatcgtgcgtcgaggcgacagccatcgattgttgcggatacgcacctggcgcgcggaagtttttctcaaggtcattttcaaaccacagcactttataagaatagaccccgctatcgcgcagcttgccgacaatctcaactggcaccgtccccagatcttcgcctatcaccatacagcggtgacgttggctctccagcgccagaatagaaagcaaatcatctaccggataatggacgtaagccccctgatccgctgtttcgccatacggtatccaccacagacgcagcaacgacatgacatggtcaatgcgcaacgcgccgcagttttgcatattggcgcgcagcaggtcgataaagggctcatacgcccgggcgacaatgatatgcgggtccattggcggcagcccccagttctgaccgagcgggccgaggatatccggcggcgcgccgacagatgctttcaggcagtacagctcccggtcgcaccaggtttccgcgccgccttccgctacgccaaccgccagatcgcggtacagaccaatcggtagtttaaaactctggcaggtatcccagcaggcggcgaattggcgccaggccagccactgaagccagagataaaactccacctcttcgcggtgcgcttcacagaattgttttacagcgggagactctaccgactggtacgcctccggccaggctggccagccccagcgctgctcatcctctttcacctgatacgcatgcagcgcgtcgaatgccgcctgccagtaaaggctttcgccttcgcgggcgataaagtgacgaaactccgccatttgcgcatcgtcgcgagcggcaaagcgcgtccacgccatccgcagcgccgtgattttcagcgcggtaacggtagcgtaatcgacccattgcgcatcgcgcgcctgtcgcagctgttgctgtgtggcgggcatttgccaccatgcctgcgcctcttcgctcaggcggaaatcttcgacggcgttgacgtcgatatatatcacgttcagccagcgacgagacgaggggctgtagggactggcgctctccggattcgccggataaagcgcgtggatcgggttcaggccgataaacgcgccgccgcgtgtcgccacgtcgaccagcatcgacttcaaatcgccgaaatcgccaataccccagtttttttctgaacgcagagtataaagctggacgcaggccccccacagttttttcccctccagcagcgcctgcggctcatagcatcgcggcggggcgacgataatccggcagtgcgtacgctgttcatcctgggtcaacgtcagggtgtggtagccctccggcaatgtagccggaaggttaagttttttaccgcccgtcacgcgccctttgtaatgcacgccctcttccgtagtcagcagccaggcaaactcaccgcgcccctctaccggcaacgccatttttttacccgcggtataaaccttcacattcggcacgaccgcctgtggtcctgttgtcgtgccgtgcatcgccgccagcaaacgtctcttggtttcagcgccaatagactgcggtttgccatgagcattgatgtaactggggctgatccccgccgccagcgcggcactatcgagacgtttattttccatcgcgctcccttagcgttttgcctgccagatacgggcttgataatcgcgaatagagcgatcggaactgaacataccgcagcgcgcggtattgaggatcgcggcgcgcgtccacgcttcctggtcacgatacagcgcatccacctgcttttgcgcctcgacataagcggcgaagtccgccatgaccaggtacggatcgcccccctgtttgccgaggctatgcagcatctggtcaaaggcatgtttatcgccatcgctgtattgaccgctttccagctcttttagcaccgcatccagcactttgtcttttttacgccatttcaccggatcgtagcctttggctttgagcgccttgacctcttccacagtatggccaaagataaagatattctcttcacccaccttctcagcgatttcaacgttagcgccgtccagcgttcccacagtcaacgccccgttcagcgccagtttcatgttgccggtgccggacgcctctttcccggcggtagaaatttgctcggaaatatccgccgccggaatgagcatttccgccgccgagacgcagtaatccggcaggaaaaccaccttcagcttatcacccaccgccgggtcgttattaatggcttccgcaaccttattgatagcaaaaatgatgttcttcgccaggtaatagcccggcgccgccttcgcgccaaacaggaatacgcgcggtacgcggtcggcctgcgggttttcgcggatctctttgtacagtgccagaatgtgcagtaggttcaggtgctgacgtttgtactcgtgcagacgtttgatttgaatatcaaaaatcgcgttgcttgaaatctcaatcccggtacgggccttgatgaatttcaccagccgctctttgttcgcccgcttgatgtcgcgatattgctgacggaacttcgcatcgtcagcgtatttttcgaggttgatcaactggtcgagatcgttagcccactcttttttcagcgttttatccagcaacgccgcaagctgcggattgcactgtttgatccagcgacgcggcgtaatgccgttggtgacattgtggaatttgttcggccaaagctggtgatattccgggaacagatctttcaccaccagatcggagtgcagcgccgccacaccgttgaccgcaaagccgctgaccacgcacatattggccatgcgtacctgacggtcgtgcaccaccgccagttttgcccatacctgcttatcgccaggccaggtcttatcgaccagcgtcttaaagcgatcgttaatctgcttgataatctgcatatgacgcggcaacagcgctttgattaacctctcgtcccagcactccagcgcttccggcatcagggtgtggttggtgtaggcgaaggttttgctggtgatagcccaggcgtcatcccagctcatctggtgttcatccagcaatacgcgcagcagttcagggatggcaatagtcgggtgggtatcatttagctgaatgacctcataatccgccagctcatgcagcttgcgtccggccagatgatggcgacgcagaatatccgctaccgagcaggcgcactggaagtattgctgcatcaggcgcagttttttgcccgccgtgtggttatcgttgggataaagcaccttcgtcagtttttccgcatcgataccctgctgttccgcccgcaggaaagcgccgtcgttgaatttggtcagatcaaacggatgggcgtgggtcgcctgccacaaacgcagcggttgcgcgacaccgttacgatagcctaacaccggcagatcccaggcctggcctgtaatcacaaaacctggctcccagcgcccttctttggtgactttaccgccgatcccaacctggacgtccagcgcctcgttgtggcggaaccacggatagctgccgcgatgccagtcatccggcgcttccacctgcttgccctcaacaaatgactgacggaacagcccatactggtagttcagaccatagccggtagcggactgcccgacagtggccatcgaatcgaggaagcaggcggccagacgtcccagaccaccgttgccgagcgccggatcgacttcctcttccagcagattggtcagattaatatcgtgcgctttcagcacatcgctaacgtcctggtaccaccccagatttaacaggttatttcccgtcaggcggccaatcaaaaattccatcgaaatgtagttcacatgacgctggcctttcgtcggctgcgctaccggttgcgcgctcagtaattccgccagcgcgccgctaacggcctgccaccactgacgaggcgtcatgtcggacgccgacagtaaaccgaaacgctgccactgacgcgtcagggcggcctggaattgatctttattgaaggttggctgtgacataggaaatccgtcctcgggtaataaaacaacgttatcgctagtttgccaggctcgatgttgaccttcctcctcccggcaatgattagggagggaggaggagcggggatgagcataaaagtgtgatcgccgccacttacccctgtataaacgcgccgattcctgtcaacgacacccagtgttacgcataatcaaatgaataaacagaaataacagtaaatcgcgaaggggtattttcgaagattatatgaacgccgaaatagtttcttacctgaaatattcagcagcgggaggttcactaacttaacataattaattaaacgcctggtatcgccattgtgttaaatccgcatcctgtccaggacattatttacaataacggaaatatgacctcagcccagctctgacgctcgtttcaaccgcgccgaatacttttttaataccgttatttagaattgtgacagagtgcaaattcagacacataaaaagtctgcttagcttgcattaaaatgctttctggccgaccttatatctattaattacgaagcgcaaaaaaaatcgcagttccccccatttcccacagtgaagtgattgctatgttgattccgtctaaattaagtcgtccggttcgtctcgaccataccgtggttcgtgagcggctgttggctaaactttccggcgcgaacaatttcaggctcgccctggtaaccagtcctgctggctatgggaaaaccacgcttgtctcacagtgggcggcgggcaaaaatgaattaggctggtactctctcgacgaaggcgataaccagcaagagcgattcgccagttacttaattgccgctatccaacaggccaccggcggacactgctctaccagcgaagcgatggcgcaaaaacgtcagtacgccagcctgacgtccctcttcgcgcagctctttattgaactggcgcagtggcatcgcccgctttatctggtgattgacgactaccatttgattaccaatccggtgattcacgacgcgatgcgctttttcttacggcatcagccggaaaatttcaccctggtggtgttatcgcgtaatttgccgcaactgggcatcgctaatctgcgcgtgcgcgatcagctgttggaaatcggcagccagcagttagcttttaaccatcaggaagcaaagcaattttttgaccgtcgcctttcgtcgcccattgaagccgctgagagcagtcgtatgtgcgacgatgtggccggttgggccactgcgctacagttgatcgccctctccgcgcgccagaaccatacctctgcgcatcactccgcccgccgtcttgccgggattaatgccagccacctttctgattatctggtggacgaagtactggataacgtggatgtcagcacccgacattttttacttaaaagcgcgatcttacgctcaatgaatgacgcgttgattgtgcgcgtgaccggcgaagaaaacggccagatgcggctggaggagattgagcgccaggggttattcctgcaacgcatggacgacacgggcgagtggtttagctatcacccgttgtttggtagctttctgcgccagcgttgccagtgggaactggcggcggaactgccggagatccaccgtgcggccgcggaaagctggatggaacagggttttcccagcgaagctattcatcatgcgctggcggcgggtgacgcgcaaatgctgcgcgatatcctgcttaaccatgcgtgggggctgtttaatcacagtgaactggcgctgctggaagagtcattaaaagcgctgccgtgggaaagcctgctggaaaatccgcggctggtgttgttacaggcctggctgatgcaaagccaacaccgctacagcgaagtgaatacgctgctggcgcgcgccgagcaagagatcaaaggggtcatggacggcacgctacatgctgaatttaacgcgctgcgcgcccaggtcgccatcaacgacggcaatccggaagaggctgagcggctggcgaaactggcgctggatgagcttcctctcgcctggttttatagccgtattgtcgcgacctccgttcacggcgaagtgctgcactgtaaaggcgatctcagccagtctttatcgctgatgcagcaaaccgaacaaatggcgcgccatcatgacgtctggcattacgcgctgtggagcttaattcaacaaagtgaaattcagttcgcccagggattcctgcaggccgcatgggaaacgcaggagagagccttccagttgatcaaagagcaacatctggaacaactgccgatgcatgagtttctggtacgtatccgcgcgcaattgctgtgggcgtgggcgcgccttgacgaagcggaggcctcggcgcgcagcggtatcgctgtgctgtccaccttccagccgcaacaacagttgcagtgcctgacgttactggtgcagtgctcgctggcgcgcggcgatctggataatgcccgtagtcagcttaaccgactggaaaatttattaggcaatggtcgttatcactgcgactggatctctaacgccgataaagtgcgtgtcatttactggcagttaaccggcgacaagaaatccgccgccaactggttacgtcatacgcccaaaccggcgtttgccaataaccattttctgcaagggcaatggcggaatatcgcccgcgcgcagatcctgctgggcgaattcgagcctgcggaaatcgtgctggaagagttaaatgagaatgcccgtagcctgcgcttaatgagcgatttaaaccgcaatctgctgttactcaatcagctttactggcaatccgggcggaaaaacgacgcccagcgcgtattgcttgatgccttacagctcgccaaccgcaccggatttatcagccattttgtgattgaaggcgaagccatggcgcaacaattgcgtcagcttatccagctcaatacgctgccggagatggagcagcatcgcgcgcagcgcatcctgcgagagattaaccaacatcaccggcataaattcgcccattttgacgaaggcttcgtcgagcgcctgcttaaccatccggatgtcccggagcttattcgcaccagcccgctcacccagcgtgaatggcaggtgttagggcttatctattccggttacagcaacgaacagattgccggcgaactggcggtggccgcaaccaccattaagacgcatatccgcaacctctaccagaaactcggcgtcgcgcaccgtcaggacgcggtacagcacgcacaacagttgctgaagatgatggggtacggggtttgaggcaaaacaggcaacgtcctggtgtgtaaatttgtttaatcataaaacctgaaagcaccggttaacatatgggcaaaaacggcgcttttaaaataaatcggcatgcgttcctgttcgttcaaatcgcaggcattcatccgttatcttataaataagaatccagtcaggctcaatatgggcatcccggtatccgctatatgaaccttgtaacgggtgatctttataaatggcaggaaggggaaaagggtggtgaatcagaagcgtcataagtgttttaagtttgccgacatccttatgacgcttttgtgcccgttttacatctttctggaactgtcccgaatattcaatttccctttgccccatagtcagatccctaactggtcaaacaaatcatcagcatctttggctttatgaatatcaacgccagcttcgctattttctatcgttcgtgacgttaactcattgggtatgcgcaaatcaaaaggcaatgccttttcacgcgcaactttagtcagtgtaatccgtatcaaatcagaaatggttaaccccatttcagccaggacatctgccgcctggtccttcagcgtttcgtcgatacgggcacgaacaagcgcatttgcagccatcgattagtctcctgtactgtgtctctatacagttcaaattgtagctcaactgagacacacatacaaaccgggcccggatgtttgccttgcaatgctcgtaaagatgacttagtcgcttacccggacaagatagccactttcggttgcttcacaggaaaatctgaccggcaaaaaccgttccaccaccgcaatattggtaagcaagtgagcggaagcccgtgccacggtaaacgcgccttcgcccgccagcgccagcggtaaaatcagctggtcggccagatgctctcccaccgccgccgggcttgcgagatagcgccgcgcttcatgcgcaacctgattagctaccgcttccgcgctggtgccttttacgccgaacgcggcgaacagttcggtcaactgttcgctttggatcatcagcaacagcgcattgcccggcccgcagccgccttccagcgcaacgacatttttctccgccagcgggaaatgggcttccagcgttgcgacttcacgttcgccaacgtggtaaggaaccgccgccagcaaagcttcagcggtggtgcgcagcgtctcgccgcgcgatatcagcgttagcccgcgtaaagacgttgccggttcgacgaccgtcgccgccgcgccgccgcctgccggataaaagccgtgttttatcagcgtggtgcgctggctgatgcccatcctcgccaacagcggctcccagacgcggcagataaaatcggcgctgggcgcggcctgattatgcgtcccgccgtgaacctccacgcgggatgaaccatcggcaaaccacagcgcgggcaggacggtttgcagcaccagcatacaactgcccgcgctgccaatcgcgaaacggtactcgccgccgcgaatcggccccggcgtaaaacgcaactgctgcgagcccagctcgtcgccgttcacctgcgcgccgcagatttccgttgccgcccgcaccgccgttaaatgctggcgtagcagccccggtttggcgcgcccggcgcggatgtcgctcatttcaaacggctggccggttatcattgataaactcagcgccgagcgcaaaatctgcccgccgccctctccctgtgcgccatccagcgcgatgatccttgccattttctatcctttaacgcacaccacctgccgcagggtgtacatgatttccaccaggtcagactgcgccgccatcaccgcatcaatgtctttatacgccattgggatctcgtcgatcacgtccgcatctttacggcattcgacatgcgcggtggcgcgaatctgatcgtcaacgctaaacagtttcttcgctttcgttcggctcatcacacgcccggcgccgtggctgcacgaacagaacgactcttcgttacccagcccgcgcacgataaagcttttcgcccccatcgaaccgggaatgataccgaactcaccgcgccgcgccgaaaccgctcctttacgcgtcacataaatctcttcgccaaagtgctgttctttttgcacatagttatggtggcagttgatctcgtccatatcgaggacgatcgatttttccacgcagcgctggagcgccgccagcgcgttttccatcatcgcctcgcggttcaggctggcgaattgctgcgcccagtgtaccgctttcaggtaatcatcaaaatattcgcttccttcattaaaatacgccagatcgcgggacggcagcgtttctaactgctcctgcatttcttgctgcgccaggccgataaaataggtgccgatggcgttaccgatcccgcgcgaaccggagtgcagcatgatccatacccgatcggtttcatccagacagatctcaataaagtggttaccggttcccaatgttcccaggtgcttatagctattggtattcaaaaagcgcggatatttttgcgttaaccactgatatcccgcttccagctgcgcccatttttcatcaacgttggcgggcgggtttccccatgcgcccacatcgcgacgcccgcgtccggtggtacgcccgtgaggcacagcggcctctatggcgctacgcagctccgccagattttccggcagatcggccgccgttaagctggtacgcagcgcgttcattccacaaccgatatccacgcccaccgccgccggaataatcgcccctttcgtcgggatcacgctaccgatggtcgatcctttccccaaatgcacatccggcataacggcaatatgtttgaaaataaacggcattttcgccgtattaatcagttgctgacgggcatcgtcttctaccggtacgcctttggtccacatttttaccggtgcgttctgggtggtcatcaattcgtaattcatcatttttttctcgttttaatcattagggtggcgacaagtttatgtgaatacaccgctctaccattgagctacagagccgggctctgacgggtctcgaacccgcaacaaatgtagatccacaggcattcgccaaaatagggtggcacgacaagttaaggtgaatcacccgctctaccgttgagctacagggctaagccccggcagggttcgaacctgcgtctggccatacaaggtgtagatccaccagcattcgtgccttcagcgttgcgcgacaaattcatagccgggatgatacgcatcgggaaagatgtaatcccggccagcattcgcgccgcgctgaatactctttacagcgtcacggcttcaatctcttccagccagtgcgcgctgccatagcgaccgttaacaaagttatctatcaccgtaaacacctcgtcgctgaagccgccgacgttcaaaatatcgcttcgttccgccgcctgggtggtaccgtaaggcagcagatcgatacacaccaggcgcgcctgcgggttgcgctttttcagttcgatccagcattccatggtggccgttgagccatggcgcgacttatcaacccacgattcgttatccgacaccataatcaccagatccacccgcgcccgctcgttcaacaacctacgcagcggcgcggagcagttggtgctgccgccgccaaccgccgccagcttttgcgcgttgtgcataaccgactggcgcgcatcaagctgcacgtcgaccacatcgcattcaaacggcagcacgcgggcctgcggatgattacgcagcacggcggcggcgatcagcccggcaacgtccacgcagcggatcttactggtcgcccccttgcgatagccggttatcgacgacttcatcgaccccgacacatccgggcagaccaccacgttgccgcgaaacggcggaatgttctccagcgcgtactccatcgcctgcgctaaagcctcgcgaataacctgcggcacgctgcattgcagattgctccacgccgacagcagctgataaggataaacccaggactggcgcacctgcgccctgtccgccagccgctgcgccacgctggcggcaagcgttgcattctcaaacacgtcatgacgcgccagcgtattcaaattcatgcgcaacgtttgccagctcatccgctgcgccagttgcgcccattgttcgcgactcagcggcgcgttggtcagcagtaaaaacggcacatcgggtaaggccgcgcccatattgccttcacgaaacgccagcagcgcgcgcgttttttccggcagttgcgccttatcgcacggcttaccaatcagccaggcaaagaaggcttcctgccacgccgcctgcggccgtgggtgcaccattttgacgatatccgccagcgacggcatattgcccaccgatgcctgcaataagcgctcttcgctggcgttctgcaaccaacgctgcaccagcttctttggccgcgtccccagcgagcgccgcccggtcacgccgctgcgcaacatttgcacaaagttacgcagcatccggccattattgatcacccgcgcaaatactaccggcagcagcgccgagccacgcgccgccagaatggcggtcaacagcgcgggcatatccttcatcatcccgcgttcgcggccataaatcgccagttgcgctaaaaacagatcgtcgagatctttcgctgtcgccagaacatcatttagctgcgcctggccgctgacataaaaagtctcgttcatgcaaccggtcatcaccatttgcgccagtgtatggcgtggggtgaaggcgaaggccgctgcgccttgctgattgctggcgttggccagcggcgcgtcccttaacagcgaacggaacaaaagtggattagccatttgtttttcccatttccgttattctccatgccagagttattgcaaccagcgtgccagaaaataaattattttatagtctattgatttttaagttatttatttccttagcgttcaggtgaaagaaaaatgcctgcacggcagccattaaaaagcgataaaattatctcgtcttttagaaggaaatctaagatgcgaaaaacggtggcctttggttttgtcggcacggtgctcgactatgcaggacgcggcagtcagcgttgggaaaaatggcgccctactttgtgtctgtgtcagcaggagacgctggtcgttcaccgcctggaactgctgtacgatgcccgctctcgctcgctgtttgaaggattaaagaaggatatcgccagcgtctcgccggaaacggaagtcgtcggcgtagaaatcgcgatccgcaacccgtgggacttcgaagaggtttacgcctgcctgcacgatttcgcccgcagccatacctttcatcccgaagatgaagactatctgattcatatcaccaccggcacccacgtcgcgcagatctgctggttcctgctggcggaggcgcgctatctaccggcgcgattagcgcagacctcgccgccgcgcaaaaaagataaaccgcatagcacgggcgacgtgacgattattgacctcgacctcagccgctacaatgacatcgccacccgcttcgcccaggagcgggaggagacgctcaacttcctgaagtccggcattgcaacccgcaacccgtgtttcaaccggatgattgagcaaattgagcgcgtcgcgatacgctcccgttcgccaatcctgctcaacggcccgaccggcgcgggcaagtcgtttctcgcccgtcgcatctatgaactaaaactggcccgccaccagttcagcggcccgtttgtcgaagtgaactgcgccaccctgcgcggcgacacggcgatgtcggcgctgttcggccacgttaagggggcgtttaccggtgcgagagaggagcgtgcaggactgctgcgcagcgccgacggcggcatgctgtttcttgacgaagtgggagaactgggcgcggatgaacaggccatgttgctgaaagccattgaagagaaacgcttttaccctttcggcagcgaccagcaggtcagcagcgatttccagttgattgccggcacggtgcgcgacctgcgccagcgagtggcggaggggacattccgcgaagacctgtacgcgcgcattaatctctggaccttcgaactaccgggcctgcgtcagcgccaggaagatattgaaccaaaccttgactacgaactggaacgccacgcggcgctaaccggcgacagcgtgcgttttaataccgaagcgcgccgcgcctggctgagcttcgccacctcgccgcaggccgcctggcgcggtaacttccgcgaactctccgccagcgtcacccgcatggcgacgctagcggacaacgggcgaatcacggtcgaaacggtagacgatgaaatcgcgcgtttgcgctatagctggaatgaccatcgcccctccgcgctcgacggattgccgggcattgacgcaacggcgctggatctgtttgaccgtatgcaactggaaaacgtcgttgccatctgccgccaggcgaaaaccctttccgacgccgggcggcagctattcaacgtttcccgtcaggggaaagccacggtgaatgacgctgaccggctgcgtaagtacctggcgcgttttgggctgacgtgggacgttttacagaattaacacagctccagttgaatatggttctccgtcaacacctgcatcacgcccggcggcggcagggtatcggtgtagaccgcatcgaccatactaatgctgcccatgtttaccatcgcgttacggccaaatttagagtgatccaccaccagcatcacgtggcgcgaattttcgataatcgcgcgcttggtgcgtacctcatggtagtcaaattccagcaacgagccgtcgctatcaataccgctaataccgagaatgccgaaatcgagacggaactgggcgataaagtcctgcgtcgcttcgccaataatgccgccgtcgcggctacggagttcaccgccggcgaggataatacgaaaatcctctttcgccattagcgtgttcgctacgttcaaattgttggtcacgatccgcaaattactgtgccctaacagggcgtgcgctacggcttccggcgtcgtgccgatatcaataaacagcgttgaaccattggggatctgggccgcgactttgcgagcgatgcgctctttttcttccgtttgcgtcgccttacgatcgtgccacggcgtgttcaccgagctggagggcaacgccgcgccgccgtggtggcgcaaaatcatattctgttccgccagatcgttaagatcccgacgaatggtttgcgggctgacagaaaaatgctccaccagctcttccgtactgacgtacccctgtttttttaccagttcaatgatcgcgtcatgccgttgtgtttgtttcatgaataatctctgaaagtaaccaaccttgcgccggatagcggcattcgccctacccggcctggaaaaatatctcgaccacaggccggatacgcctcacgttcgttttcgcgcattcagcgtatcaacaaaggccatcgctaaaccgacgataagcccggcgatgtgcgcgccgttcgccatagacatgccaaaccagtcaaaccaaccagcgactatccacaataatgcaaaaataattaagccgcgctggaggtaaattccgctttgcggatcgcgctctccacgcagccacacgtaacccatcagcgcatagacgacgccagacagtccgccaaaccacgggccgctaaatttctgctgtacatagccgcttagcagcgcgcttatcaccgtaatgacgattaatttaccgctgcccaggcgcttctctaccgccccgccgagataccaccaccacagcaggttaaaaagaatatgcatcagtgagaagtgcataaagatatgggtgaagtagcgccagacttcaaattttaaaaccggatcgaacggccacgccagccacaccatcaccgtctgatcgccgatgagactcatcgcgatatagaccagcacgcaggcgagcatcacgatccaggtaacagggccggctcgttcacgcagcgtggcgagaaagggaaaacggcgatagcgtagcccgctgttagtctgcccggactgccagctagccgccagataacgcggatcgccgggattttctataaaccgcgccagctcgccccgcacacgttcggcctgcgattcatctgccaaccagatatcgctttgattatgttgctgaatagtaagaatgacgccctgggtggccatgtaatcaacaaatgcctgcgccacgcgaggattcgcaaaggaagtaatcatcaacattattgctgtcgcttagtccatacaaaagaagacagtatatatacccttctcgtcggaggctgcatctttatgggattacgcgccattcgcgacatcggcagggaaacggcgatgccaggcctcaaacccgccgtcaatgctgtaaaccgcatcatagccttgctggagcagatactgcgcggcgcctttactactgttgccgtgatagcacattaccatcacggcggtatcgaaaccatgctcacgcataaacgcgcccagcgtatcgttagtcaagtgaaacgcctgcggcgcatgacccatggcataactttgcggatcgcgaatatcgaccagcaccgccgcgccctggtgcagtttctgatacgcctcttctacagtgatacattcaaattgttccatgaatcgctctttcattattgccggtgaagccaattaaggcattttatcgcccagtgtacgttgacggagtagcttagcgccataatgttatacatatcactctaaaatgttttttcgatgttaccaatagcgcgtttctttgctatcatgttcgataacgaacatttttgaactttaacgaaagtgcaagagggcagcatggaaaccaaagatctgatcgtgataggcgggggcattaacggtgcaggcatcgcggctgatgccgccgggcgcggtttgtccgtactcatgctggaagcgcaggatttggcctgcgcaacctcttccgccagttcgaaacttatccacggcggcttacgctaccttgagcactacgagttccgtctggtcagcgaagcgctggcagaacgtgaagtgctgttgaaaatggcgccgcacatcgccttcccgatgcgttttcgtctgccgcaccgcccgcatttacgtccggcctggatgatccgtatcggtctgtttatgtacgatcacctcggcaaacgtaccagtttacccggttccaccggtgtgcggtttggcgcagattcggtgctcaaaccggaaatcgtgcgcggattcgaatattccgactgctgggtagacgatgcgcgtctggtgctggctaacgcacagatggtggtgcgtaaaggcggcgaagtccttacccgtactcgcgcaaccgccgctcgtcgggaaaatggcctgtggattgtcgaagcggaagatatcgacaccggtaaaaaatatgtctggcaggcgcgcggactggttaacgccaccggaccgtgggtcaaacagttcttcgacgaagggatgcacctgccgtcgccatatggcatccgcctgatcaaaggcagccatatcgtcgtgccgcgcgtccataatcagaagcaggcgtatattctgcaaaacgaagataagcgtatcgtctttgtcattccgtggatggaagagttttcgatcattggcacgaccgatgtcgaatataaaggcgatccgaaagcggtaaaaattgaagagagcgaaattaattacctgttgaaggtttataacgcgcacttccagaaacaactggggcgcgatgacatcgtctggacgtactccggcgtccgtccgctgtgcgatgatgagtccgactcaccgcaggcgatcactcgcgattatacccttgatattcatgatgaaaacggcaaagcgccgctgctttccgtgtttggcggtaagctcacgacctaccgtaagctggctgaacacgcgatggaaaaactggcgtcttattatccaggcatcggcccggcatggaccaaaacgtgcgtactgcccggcggcgacatcgacggcagccgcgaagattacgcggcgaagctgcgtcgtcgttatccgttcctgacggaatcgctggcgcgccactattcgcgcacttacggcagcaacacggagtggattctcggcgaagccacgtcgctgcttgatttaggcgaagatttcggtcatgagttttacgaggcggaactcaagtacctggtggatcacgaatgggtgcgccgtactgaagacgctatctggcgtcgcaccaaagaaggcatgtggctgaccgccgaacagcagtcccgcatcacccagtggctggcggcgtatgttgagaaacaccaactttcaatggcgtcgtaataaaatccggggcggtttataccgcccttttcgccacataccgcattcactcgccgggttttgtacagccgggcatatgattagtgatacggtagcgatcgacacttatttgggtaataaagaagggttttgcccgcgcttcgctattccagagagttttccccgttttacaccagcttttatgagaaaagttggcataatgaaccacactctcctcccccagcacgctttcaaaatgcgcgcgtttatcaccgtcggccacgctaaagtcagcataaaaaagattgctgtccaggttaaacgtcatctctatttcactggcggacgatggaaagaacacaggcagccaggtccagataccggattgctcgggtatggcggcataatcaggaaaatagcttacctggcgatcatcgcaggcggtcagcacagcgatgatgattaatgctgcaccacaccggaggacctgattaatcagctcagcaacaatatctttatgccacgaagtggattcacgccgtgcaatacgaatatcagcgccgctggccgggtctatgccaacccgttccacatataatttaacctcttccatttagtccctttatttcgcggccggatacagcggcacatatcccacatcctgcaccaactgttgtccctgcgggcttagaaaccagtccaccagcttttgtgtttccgctgtggggtgttcacgggtgaccatataaacatcaaccgtgtacgggtaactgccgttacgaatattttcaaccgtcggcgcaacatcgtttatcgccagtaatttaatctctttattgctgtgcatctgcgtagcgtaataacgaaaggtatagccaatggcgttgtgcgtattgcgatactcagccacgatatccaccatatcccccatcgcggttgccactgatgttgtttgcgctggcatcagcttcgtttctttcattaccttcgccagcatcgccgtttggctgccagagttttccggtcgctgccagggcttaatgtcgattgcctctccgcccacctcattccagtgggtgattcttccgctaaaaatgccgcgaatttgtacatcactcaacgatgacacgggattgttttggttgacgataaacacaaacgcttcacgtgcaaagggggtgtaaaccagttttacgccactggcctcggccaattgcttttgagcagtggaaggctgggcgacaaaaataagatcggcattaccgttaaggatattttgataggcttcaatggttccctggttttcaaggtagtcttcagggcagatatcatccggaaagcgcgtaagcgcataaaaagccgaggcgtataacggcaagccagccgttgcgccatcgagccgcggccaattttgggtgagcaaaagtgtcggttcatcgcgcagcccggttagcttgttgccccatgtgtgcgcctgataatcgcggaaataaagatattcactgctctcgggagcgggatacttcacggcataaagatgtgactggtatacggcacagctcccgaaaaacagcaggcaaatcaccagcagattacgacaagagtagcccgcaccgccgcgtagcactccccaacgcgcaccgccataccccaatgcaaaacagagctgcgagccaaccgggatgagcaacactgcccatacccagccgttgaaaaaggatattacgctgggtactaaccaaagcgtttgcaccacctgggcgatgggtttacgccctatcgcgcgaatattaagatcggtgagaaacatcaggatgacccaccccatcagcaccaccagagcgggcataagcaggcagcaatcacgccattctggatttacctctgatgcatttccctttccccatattcggccacagagaaaaattaaccccgcgcccagaagcgctaccgggataatggtcgccttctcaatagattgcgcgatggggatactattttcaagaacgctaatgtacgcccacattccccccacgataatcgtaataatgttcaccagcagcggcacgccgataaacgccatcatgattgacaaaaaaagccacttagcatttttcatttttctatccgctaatccctgcgatagcggaagtataaacccggtagtcctgagcaccccccatgcatttttctgaaatagcgacgttaaaacattcacgatagcggcagacagaagttgaaagttccggctgccgttttttatttacaggctcacattaacctgcaagatcgatctttttccgcgcctgcccaacagcatcggcggcccgcaatgccgcctgcacagcctccggcgtaatggtaaacggctcgttgtgcatcgtttccccggtttgacaagacgccctggcaacggccagcagttcatcatcgctaacgccagccagaccaatatccgccagcgtggtgggcaagcctatatcttcacaaaattgataaacctcctcgataagctcaggcgctctatcggtgagcataagcattgccagcgtgccaaacgcaaccttttccccatgccagtatttgtgcgtggcgggcagtaccgtcagaccgttatgaatggcgtgcgccgccgccagcccaccgctttcaaaaccgagcccggataatagcgtattcgcttcgataacatgttcgagcgccggagtaacctgatgttgttcacaagcaagcttcgccaggcgcccatagcgcattaaggtggtgtagcaaaagcgcgccagctcaaatgcggtcatcggtcctggcctagtggtcatattgcctgcccctttgatgcggcaatcttccgcttcaaaccaggttgccagcgcatcgcctatcccggaaaccaaaaagcgtaccggcgcggcagcaataatactgctgtccaccagcacaagcgtcgggttacgtggaatcatcaggtagcgtttgaatttcccttctggcgtatagataacaaccagtgaactgcacggcgcatccgttgaggccagagtaggaaccacggcaataggcagccgcaggctggcgccggttgcttttgccgtattcagggttttcccgccccccataccaacaatcacatcggcgccaatttcctgcgcgcgtgcggagatgcgagcaatttcctcatcactgcactcgctactgaacacttcgatatcaaattcaatcaccccgtgcagtgctgttgcaactgtatcccggtaggtgttgtgaacaacaggatcctgcaaaatcagcgccttatgaccgagtgcggccaattcctgcgggagatgcgttgtcaacgctcctttaccctgaacatatcgtgacggaaagatcgcggtagtaaccattgtttctccttaaaaagcattaaagttcaatatacagaacacaaattccacataaagaatttaatgctgtttactctgaacgcacaatgaccaggtgagagcataatcttatcctgtgaggcagcgcacaattttggctatgtattagaccgatgagcagtttccattgggttatccgctctttctcaccttatctccgttcatttttgaagcaaatcacaaaatataaccttccttagagtatggaattgacgctgtatgaatacgtcggcatagtgtcaatatacagaacagtagttccatatacagaacacatttttgatactaaagggatgcaatgatgagcattgaaatagagaaaccgaccacacgagggcgctggctgcatattattccagccacgatcctcgtttatatcgtggcctatatggacaggaccaatatcgccattgggatcgcaggcggcatggatgaagatttaggcatgacggcttcttttgccggtctggtcgccgggatcttctttattggttatatcttcctgcaaattcccggcggtcagatagccgagcggctaagcgccaaaaagttaattgcctggacaatcgtcgcctgggggggctttgccctgctgaccggttttgttcagacaccgacgcagttgttgattatccgctttgtgctcggcgtggcggaaggtgctgtgtatcccgccattctggcgctgattggccactggttcccaaatgaggagcgcgccagggctatcgcctatttccagatgaacctggccgtcgcttctattattaccgggccgctttccggctggcttattgaaacctacggctggcgggagatgtttatcatcgaaggcttgctctctctgggactgctctttgtctggctacctttggtttccgatcacccgcatcaggcaaagtggctggatccgaaagagcgcgcctggatcgaacaaaaattgctggccgatcgcgcgttgagtattggcggagagcaaagcagcattcgcggcgtattaaaaagcatcaacctgtggaagcttgtcggtatctatttcttcgtacaggtcggcttctatggcttcgcgctatggatgccaaatctgattaaacacctgaccggcagcggcatgaccatcgttggggtactcactgcggcgccttacgttctgtgcattatcggtcagtattacatcgccaaatggtgtgataagacgatgaatcgccgcctttacacggctattcctctgctgggtttcgcggtctgcctcgccctctccttattactgaaagataacgtctggctcgcctacggcatgatggttatttgcgggttcttcctgcaagcctatgccggtccattctggacgctgccgccattactcttcgcccccaacgttctgggcggcgtgcgcggcacgatcaacgccctgggcaacattggcggctttatcggtccgtacctcgtcgggctgttaacggtgacgttctcgcaaacagcaggaatgaccgtactggttgccgccctgcttatcgccgttggactgcttttcagcttaccttctgttaccgctcgtcctgcaggtagcagtaacacacctaacacctcgacgccgggtgcgtcacttaaacaggaaggaatcgccaaatgagccaaaaatgtcaacatgctcgcgacctgtggtcgcagctcgacgccctgcgtcttggaatgaattacagcaaagaagatgtcaataaactgcaggtcctggtggatgattgctatggcgaaagtcatccgggcagtttccatcttaaccaactgggcgatgaagccgtgctgggtgttcatgaaagcggcgggcgcgcggtccgtcaccatgtgacggatatctgcgacggctggggtcagggccacgatgggatgaactacatcctggcatctcgcgaagccattgccaacatggtcgaaattcatgcctcagtggtgccttatgatgccggtattctgatctcaagctgcgataaatctatcccggcgcatctgattgccgccgcacgcctgaacctgccgctgctgcatattcccggcggttctatgcgtccggcaccgaatatgagtacttctgacctcggcgggatcactgctaagttgaagaaaggcgaaatcggcattcagcaagtagaagccatgcagcaatgcggttgccccaccgccggagcctgccagtttatgggaacggccagtaccatgcagtgcatgtcagaggccttggggctgaccctgccaggcagcgctttgctgccatcgaccctggcggaaattcgccgcgttgccagaaccgcaggccaccaggcgctgtatctggcggagaaaaatatcaccacccataagatcctgactcctgcggcgtttgaaaatgctatcaaagtccatgctgctattggtggcagcaccaatgcgatgatccaccttccggccatcgctcatgaacttggatgggagctgaagcccgaactgtttgatcggatcaataacgaaatcccttatctgaccaatattcagcccagcggtgaatacgttaccgaaatgatgtggttcgctggcggcgtgccaatggtgcaatggtatctgcgcgattatctggatcttgatgttcttaccgtgactggccgtacgctcggcgacaacctggaaatgctccatcaatctggcttctttacccgtaaccacggttacctcaacaattacaaagtcagtccggaggaggtgatccgtaaaccagaaaatgccaccaaaaaagggtcgattgcggtactgaaaggcaacatcgcgcctgaaggagcggtcattaaatacgcggcctgtgcgccggatatgcaccaccataccggtcctgctcgggtctttaactccgaagaagacgctcagcaggccatcatccataaccatatcgaacccggcgacgtcattttcattcgctacgaaggcgcaaaaggctctggcgcaccggaaatgctgatgaccaccgatgccatcgtgtatgacaaacgcctcgacggaaaagtcgcattgattaccgacggtcgtttctctggagcgaccagcgggccatgtgtcggacacgtctcgccagaagccgctgatggcgggccgattgccctggtggaagatggtgatttaatcgaaatggatgtgaaaggccgcaagctcaatattgtagggatcgacggggtgtttaaaacagaagaggaaatacgccgctgccttgaagagcgtcgagcaagctggaagaaacctgattattcaaaccgtcacggcgtctttaaacagttcaccgctaatgcaacatcattaatggccggagcctggcttaaataatatccctggcgggctacggctcgcctgttttaaggatcaatacatgactcagattacgaaatttcacggcgtatttccgccagttccgaccattgttaatgcgcagggagagttagataaagtcggcatggcaaccttgctggatcatcttattgcaagcaaggtcaatggcgtattactgctgggcagcgggggggaattttgccatatgaccaatgcgctgcgtctggaaaccgcagagttttgcgtccgtcatattaaccgccgtattccagtactattaggtattagcagcaccagcacgcaggaagtgattgagtatggtcagcatgccgaccgactcgaagtcgatgccgtgctggtactcaatccctactatgccagattgaccgatgagtatatttatcatcatttcaaaaccgtggctaataacataaaaagcccggtcattctctacaactttccagcattgacgggacaggaccttagcgttgatttaattacccggctggcgcaggatcaccccaatattatcggcattaaggataccgttgataatatcagccatattcgtgaaatcatcaataatgtcaggccagtgcgtccggacttcgttattttctccggctatgatgaatatatgatggatacacttatcttaggcggcaacggcgggatcccagcgacagcgaactttgcgccgcagctaacctgcgggatctaccgcgcgtggtgtgaaaaagagtatgagacaatgttcggattacagcgccggctgtccgcgctttccactatttacagcctggattcacctttcttcgggataatcaaaaaggcaattcagcttagcggagtcgatatttcaactcatgtaatgccccccgttttgccggcaaatgaagaacatatttcgaatttgaagcagatcttacagcgtgcgggactttaagctatgacgaaagcgggcttcttgcccgctgtgtctttttatttcagcacatcagacgcgtcaggctacggctggcatccatcatcagcgtagcaagcgactcgcgtttatcatcggggatctggaacgtaacgccggatacgctcagggcggcgatcactttcccctgcgtattgaataccggcaccgcaatgcagcgcacgccaagggagtcttcttcgttatcataaccccagccgcgacggcgaattcctgctaactcctgcttaaggatattcacatctgtgatcgtcgtatccgtaaaacgcgttaatatctgatctggaggcagcaactcctccagctcttccccgctaagccatgcaatcagcaccttccccagccctgagctatgtaatgagaggcgcttgccctcccagcttcgaatcacaatagcctgtgggctttcgactttcagaagataaatgggggcatcgccctccagaacgccaagatggcaggtcaggccggtgttatcgcgaatctcttcaagaatcggtaacgcgatttttttaatgtcatactgttccgccgctttattacctaattcatacaggcgtagccccagataatacttgtctttttcctggcgtaataacccatgctccaccatgccgttgagcaaagatgaggtactgcttttcgcaatccctgaattttgatggatctgggtaaacgttgcgccatcgcactccagaaggtaagcaaatacgcgcataattttatcgagagccggaatagatgtcgtaatctttttcatattattatcaattaattatggatttttctgctaatactatacaccagtactcaaccctttttccatgacagagaccaagtgccgctaacagattcagcagacgaatatcggcataccccccgaatataccacgataaaaaacggggccgtttggccccgttctcaagcgttaaaccgctacaaccgcaccggatcaatatgccagatattttcggcatactctttgatggttctgtccgatgagaagtagcccatattggcaatgttgagcatcgctttcgtcgtccattcttccgggcgacgatacaactcatccaccttatcctggcagtccacgtagctgcggtagtccgccagcacctgatagtgatcgccaaagttaatcagcgaatctaccagatcgcggtaacggcctggctcttccggattaaagacgccgctaccaatctgcgtcagtacctgatgtagctcttcatctttttcataatagtcgcgaggcttataaccctgcctgcgcaacgcttccacctcttctgcagtattaccgaagataaagatattctcctcgccgacatgctcctgcatctctacgttcgcgccatccagcgtgccaatggtgagcgcgccgttcagggcaaatttcatattactggtgccggaagcttctgtccctgccagcgaaatctgctcagacaggtcggcagcgggaatgatcacctgcgccaggctgacgctgtagttcgggataaacactactttcagcttgtcgccaatctgcggatcgttgttaatcactttcgccacgtcgttgatcagatgaataatgtgttttgccatgtaataggcggaagccgccttaccggcaaaaatattcacccgcggcacccagtcggcctccggattttctttaatgcggttatagcgggtaatgacatgcagtacgttcatcaactgccgcttgtattcgtgaatacgcttaatctgcacgtcgaataacgctttagggttcaccaccacattcagttgttgcgctatcactaccgccagccgttttttattttccagcttcgcctgacgcaccgcatgattgaccagcggataatcacaatgctgcttcagctcgctgagctgactaagatcggtacgccaggtacgaccaatattctcatccagcacgtcagaaagcggcgggtttgccagcgccagccagcggcgcggcgtaacgccgttagtgacgttacaaaaacgggtcggaaaaatcttcgcaaaatccgcgaacagcgactgcaccatcaggttggaatggagttcagaaacgccgttgactttatggctgaccaccaccgccagccaggccatccgtacccggcggccgttcgactcatcaataatcgacgcgcgtccaagcaggctggtatcgttgggatattgctcctgcaacgttttaaggaaatagtcgttaatctcgaagataatctgcaggtgacggggcagaattttccccagcatatcgacgggccaggtttccagcgcctcgctcatcaacgtatggttggtgtaagagaagacctgacagcacacctcaaacgcgtcgtcccagctaaatttatgttcatcaatcagcaggcgcatcagctcaggaattgacagcaccggatgcgtatcattgaggtgaatggcgattttatccgccagattctcataggttttatgcagttgataatgacggtgcaggatatcctgcaccgtcgccgagaccagaaaatactcctggcgcaggcgtagctctcgtccggaataggtggaatcgtccgggtagagcacccgtgaaacgttctcagagtggtttttatcttccaccgccgcaaagtagtcgccctggttgaatttaccgaggttgatttcactactggcctgcgcattccacagccgcagtgtgttagtggcgtcggtgtcgtaaccggggatgatctgatcatacgcgacggccagaatctcttccgtctcaatccagcgcgcttttttaccttcctgctgaatgcgcccgccaaaaagcaccttatagcgtgtattgtggcgcttgaactcccacgggttgccatattccagccagtaatccggagactctttttgccgcccgtcgacaatattctgcttaaacatgccgtaatcgtagcgaatgccgtacccgcggcccggtaatcctagcgtcgccagcgagtccaggaagcaagccgccagccgtcctaagccgccgttgccaagccctgggtcattctcttcatcgatcagctcttcgagatctaagcccatggcctccagcgcgcctttaacgtcgtcataaatgcccaacgagagcagcgcgttagagagagtacgaccaatcaaaaactccatcgacaggtaataaacctgccgggtttcctgcgataattgggctcgattagaacgcagccagcgctccaccagacgatcgcgcaccgcgaacaacgtggcgttcagccattcgtgtttattggcaatgaccgggtctttaccaatcgtaaacatcagcttataggcaatagaatgcttaagcgcctcaacgctgagtgtgggcgatgcataagtaaacggagcattcatataaatgattcctggatgactatttcaagcgatagtacagctcgcggtatgatttcgcggcaacttgccagctaaaatccatcgccatcgcctgccgttgtacaaaccgccaaagcgaaggccgtgaccacaacacaaaagcacgccgaatcgcgcgtagcaacgaccaggcattactgtcttcgaagacaaaaccgctggcgataccgtccgccagattttccaacgaactgtcggagaccgtatcggccaaccccccggtacgccgcaccagaggcagcgtgccatactttaagccatataactgcgttaagccgcacggttcgaaacgactgggcaccagaataacgtccgcgccgcccataatgcgatgcgagaaagcttcgtgatagccgatctgtacgccaacctgccctgggtgttccgccgccgccgcgaggaacccttcctgaagcaccggatcgcccgcgccgagtagcgccaactgcccgccctgctccagcagccccggtaacgcctccagcaccagatccagacctttctggttggtcagacggcttaccacggcgaacagcggcactttgtcgttaaccttcaaccccatcgcaatttgtagctgacgtttgttttccgccttctcttccagggtatcgcgcgtgtagcgcgacgccagcagcagatcggattccgggttccagatcttctcatccacgccgttcagtatgccggacaagcgcccttccagatgacgctgacgcagcaggccttccataccataagcaaactgcggttcggtaatttcacgcgcataggtcgggctcaccgccgtaatatggtcggcatagtacaaaccggccttcaaaaaggagagttgtccgttgaactccagcccatgcatattaaagaatgaccacggcagttcgatgtcatccatatgctttgcataaaacatgccttgataggccaggttgtgtacggtaaagaccgatttcgccggccgcccgcgcgccgccagataggcgggcgccagcccggcgtgccagtcatgggcgtgcaccacgtcggggcgccagaatggatcaagtccgcaggccatttcacagccgacccaccctaacagggcaaagcgcagcacgttatcggtataggcatataaattcgtatcgtgatagggactgcctggacgctcgtacagatgcggcgcgtcgatcagataaatgcccacgccgttataatgcccgaacagcagcgatatcttacctgcgaaagtatcgcggcggctcaccacatgcgcgtcgggtatcccccgacggatatcgggaaaccctggaagcagaacgcgaacatcaacaccatccgcaatttgtgccgcaggcaacgcgcctatcacatccgccagccccccagtcttcagcagggggaacatctctgaacatacatgtaaaacctgcattatcgctcctgtttgacctgcagtttgcgcagcatttcacgcgtgaccagtacaataccttcttctgaacggtagaaacgacgagcgtcctcttccgcattttcaccaatcaccatgccttccgggataatacaggcacggtcaataacacagcgacgtaaacggcaggagcgccctacccaaacctcaggtaacaacactgccgaatcaatattacaaaaagaatttattctcacccgtgggaagagcacagattgcaccaccaccgaaccggagataatgcagccgccggagaccagcgagttcagcgtcataccgtggctaccggagcggtcctgcacgaatttcgcaggcggtagcgattccatatgcgtacggataggccagttctggtcatacatatccagctccggcgtcaccgaggctaaatccaggttcgccttccagtaagcttccagcgtacctacatcgcgccagtacggttcggcttgcggatcggactgcacgcaggagagcgggaaaggatgcgcgtaagccataccttcgcgggtgattttggggataatgtctttaccgaaatcgtggctggaagcgtcatctttatcgtctgccgccagcaattcatacaggtaatcggcgtcaaaaacgtaaatgcccatactggccagcgatttgctggcgtcaccaggcattgcggggggattcgccggtttttcgacaaaatcaataatcttgtcgctttcatcgaccgccatcacgccgaacgccgtcgcctctttgatcggcaccggcatacaggccaccgtgcaacgcgcgcccttttcaacgtgatcgatcaacatacgcgagtagtcctgcttgtagatatgatcgcctgccaggatgacgacatattccgctttatagcgacgaataatatccaggttctgggtcaccgcgtctgccgtgccgcgataccagttttcgcccttcatacgctgttgagctggcagcagatcgacaaattcgttcatctcttcgctaaacagtgaccagccgcgctgaatatgctgcaccagcgtatgggactgatactgagtgatcacgccgatacggcgaatcccggagttcagacaattagataaggcgaaatcgatgatgcggaacttcccaccaaagtggacggctggtttggcgcgtttgttcgttaaatcttttagacgcgtgccacggccgccggccaggattagggcaacagatttcaatggcagctggcgcgccaacattacacgatcgttcttctctaaactcaccatgattaactccttttttatcctctctggaacacacacagtccatgcgcaggtccctgccagaccgccgttatcaccggattatcctctccagcgaatgggggaacggcgcgccattccccttcgggtaaaactatatctgtcacctcaagcgtggcatttatcgcaatcagaaaacggtccgacaacagaatttgcatcagcttaggcccgttttgccactcatccgcactcaagggttgcgcgtttttattcagccaacgcacgttgccatcgccctcttcccaccagctattgccggttaaagccggtatctgctgacgcaaacgaatcagcgcggcggtaaacgtggttaacccacgatttgcctgctgccagtccagccaggttaaggcattatcctgacagtaggcgttattgttgccgtgctggctatggccgtgttcatcgcctgccagcagcatcggcgttccctgagagagcagtagcgtcgccagcagggcatgaatgctgtcgcgccgccgctccattaaatcaagcggaccgcctaatccttctttaccatgattgtcgctgtaattgctgttggtgccgtcgcgattttcctcaccgttcgcctcattgtgtttctgattgaaacagacgcagtcccggagcgtaaaaccgtcatgcgccgtgagcagattgacagaggcgccgggcgcgcggccattgcgtttaaacacatcgctggaagcggcgaaacgacaggcaaactccccggtcgtcaggttacgcggcaaccagaatcggcgggccgcatcgcgaaaatgatcgttccactcggcaaacggtggcggaaaattcccgacctgatagccgccctcgccaatatcccacggttcagcaatcagcttgaccgttgataacacaggacacgctttaatcgcggcaaacagcggcgcatcctggcgaaacgtcggcgtgcgccccatgacggacgccaaatcaaaacgaaaaccatcgacatgacaggtttccacccaatagcgcaaacactcgcacgcgtattccaccacgccgggatggcttaaattgagcgtgttgccgcaccccgtccagttgtgataatcgccatcgtcccttatccaataatagctacggttatcaattccgcgcagggagaaggttggaccgtccagatccagctcggcgctatggtttaatacgatgtccagaatgacctcaatccccgcgcgatgcagcgctttcaccgcatcgcgaaactcgtccagcgccatctcgggcgaactggcccaggcgggatgcagcgcgaacatcgccatcgggttataaccccaataattggtcagccccatacgttgcaggcgcggctcgctggcaaactgcgccaccggcaacagttccagcgccgtaatgccaagctgtttgaagtacgccaccatgaccggatgaccgagcgctttataggtgccgcgtatctcctgggggagttccggatgcagataggtaagccctttgacatgcgcttcatagatgaccgtttttccccacggcgtgcgcggcgcggcgtcatcttcccagtcataatggtcgctgattaccacacttttcggcgccaccgccgcgttatcgcggtagtccggttcatcgtgtccgccgtgcaacagcggatgatcttttagttcgccctcgacccggcgcgcataaggatcaagcagtaacttcaccggattaaaccgatgcccctgcgctggctgccacgggccatgtacgcgatagccatagcgcaaacctggcctggcgccggccagataaccatgccagacatcgccgcgacgtcctggcaggtcatagcgacgctcattccctcgggaatcaaaaacgcacagctctacgcgctccgcatgggcggaaaagagcgtgaaattcacgccatgaccgtcatacgttgcgccatgcggcgttgcttcgccgatcgcaagctgcgtcattccccctcccgcatcagccagatcgtcgccaacggcggtaacgtcaggttaagagagtgctgacggccatggctttcgatctcatcgctgtgcaccacgccgccattgccggtgttgctaccgtgataatgcatcgaatcagtattgagaatttcacgccagcgtcccggctggttgatgccaaagcggtagtcgtggcgaggaacgggcgtaaagttgctggcgacgatgatctcgttaccggctttatcacggcgtacaaaaatcagtaccgagcgttcattgtcatcgaccaccagccactcaaagccgtaagcatcaaaatccagctcatgcaacgctttatggtggcgataggtgtggttgagatcgcgcaccagactctgaaccccgtggtgccagttatcgcccccctccagcaggtgccagtcgaggctggcgtcatggttccactcgcgtccctgggcaaactcattccccataaacagcagtttcttgccggggaaggcccacatccagccataataggcgcgcaggttggcgaatttttgccacgcatcgcccggcatacgatcgagaatggatttcttgccgtgaaccacctcatcgtgcgacagcggcagaacaaagttttcggtatggttgtacaacataccaaaggtcagcttgtcgtgatgatactggcggtacaccgggtccagcttcatgtagtccagcgtgtcgtgcatccagcccaggttccacttgtaccagaaccccaggccgcccgtttccggtggacgcgtcacgccagagaagtctgtcgactcttccgccatgctgaccgcgccgggcacctgctcgccaataatgcggttggtattgcgcagaaactcaatggcttccaggttttcacgaccgccgaactcgttcggtatccactcgccctctttgcggctgtagtcgcggtagatcatagaggccaccgcatcgacacgcagcgcatcaatcccaaaacgctccatccagtacagggcgttacccaccagataattactgacttcacgacgaccatagttgtagatcagcgtattccagtcctggtgatagccctcgcgcgggtcgctgtgctcatagaggtgggtgccgtcaaactccgcgaggctaaattcatcggacgggaaatggcccggcacccagtcgagaatgacgttaaggcccgccgcatgggccgcattgatgaaatagcggaagtcgtcccgcgtaccaaagcggcgggtcggcgcgtagaggccggtcggctggtagccccaactgccgtcaaacggatgttcgttgaccggcaagagttcaaggtgcgtaaagcccatccatttggcgtaaggcacaagctgatccgccagctcacgatagctcagccagaaattgttatccgtatggcggcgccatgaacctaaatgcacctcataaatcgagatcggcgcatcaaactgattggctttttgtcgttcttcgcttggcgtcactttctccggcagtccgcaaatcatcgacgccgtttccggacgcatctgcgcctcaaaagcatagggatcggctttaatgcgcagattaccgttcgcatcaagcagctcgaatttatacagttgtccattatgcgcgccggggataaacagctcccaaataccgctctctttgcgcagacgcatcgggtggcgacgcccatcccaatagttgaattgcccgacaaccgaaacgcgacgagcattaggcgcccaaacggagaaacgggtgccggtgacgccatccatcgtatcggcgtgcgcgcccagcgtttcataaggacgcaggtgggtgccttccgacaatagccaggcatccatttcctgtattaatggaccaaaacggtaaggatcgtcgatgagattctgctgtccgtgccaggtcacggcgagctgatagcgaaagaaatttttacgtcggggtaaaacgccgcagaaaaaaccgcgagcgtcgagacattccagtttgccgactttacgtccggttttgggttcaatcacccatacgtcggtggcgtcaggtaatagggcgcggacttctagtccggcttgggtctggtgcattccgagtacggaaaaagggtccgcaaaatgtcctgcaattagcgcattaatcacgtctctatcgatacgactggacatggtttgtcatcctgttttgtggcgtcactccatctcactgaattcaacatcaggtagtgacacttctttgacctgaacggcgcagcacactgtgcatcctatctgcgtcgtcctaccttcaggttaggcttaatacccgtgggattaagctacccttaaagaatagccaatgctctgcttaactcctgataaaaatgaaacatctgcgtttactcctgtattacgcaaaaaaagggtgacgatgcacccctggtttaacacaaatttccccgccggatggcggcgctgacgcgccttatccggcctacagaaccacacgcaggcccgataagcgctgcaatagctactacgccaactggcgcagcattcgacgcagcggctcggcggcgccccataacaactggtcgcctacggtaaacgccgacaagaactctggccccatgttcagcttacgcagacgaccaaccggcgtagtcaacgtgccggtcaccgccgccggggttaattcgcgcatagtgatatcacgatcgttcggcaccactttcgcccacggattatgtgccgccagcagttcttccaccgtcggaatggatacctcttttttcagcttgatggtgaacgcctggctgtgacagcgcagcgcgccgacgcgcacgcacaaaccatcaaccggaatcacagaggcagtattgagaatcttgttggtttccgcctggcctttccactcttcgcggctctggccgttatcgagctgtttgtcgatccaggggatcaggcttcccgccagcggtacgccaaagttatcaaccggcagctcgccgctgcgggtcaatgccgtaactttgcgttcaatatcaagaattgcggaagacggcgtcgccagttcatcggcgacatggccatacaactgacccatctgggttaacagctcgcgcatatggcgcgcgccgccgccggaggcggcctgataggtcgcgacggatacccagtcaacgagattatgggcaaagagaccgcccagcgacatcaacatcaggctaacggtacagttaccgcccacaaaggtcttcacgccattgttcaggccgtcggtaatcacgtcctggttaaccgggtcgagaataataatggcatcatctttcatgcgcagcgtagaagccgcgtcaatccagtaaccctgccatccgctttcgcgcagctttggataaatttcgttggtataatcgccgccctggcaggtcacgatgatatcgagcgcttttagcgcatccagatcaaaagcgtcctgtagcgtgccggtggaggtgtcgccgaaggtgggcgccgcctgtccaaactgggaggtagaaaagaaaacagggcgaatagcgtcgaaatcgcgctcctctaccatgcgttgcatgagaacagagccgaccattccgcgccagccgataaaaccaacatttttcatagcgtttttttcctgcaaagagatgtgctgtgtatgagcgccagtatcctgtggcgcatccttcaccatacaaaaagcagccaaagtcgcaagtgaaattaatcaatgatagcgaagccatcagtaatgcgacttatcctgccttaccgcgcaagcagaaagtccagtggcgattatcagggaatttgcgttaggaagggaatcatttccgtcgctgttttattgatcctaattatggatcagcgtagaaatttgcctgcttttatgcgcgtactgaaacatggcgaggcaaaatgtcgttgggcgattgccatgcacacctcaataaaaaaaccgggtagcgattacgccttacccggcttacggtatcgatatgtgcccgtttccaggcccggtaagcacagcgccaccgggcaacaagactcagctcagcagttggaaagcaatcatcccgacaatcgcgccgaccgtgccgaggatagtttccatcatcgtccaggtcttcagcgtctgcgcttcggtcgcgccggtaaatttaccgaacagccagaagccggcgtcgttaacatgagaaaccacaattgaaccgccggcgatacagatagagagcgccgccatctgcgcgccggagaaattcagttgctcaatgaccggcatcaccagaccgaccgcggttaaacacgccacggtcgcggaaccctgaatgatgcgcaccgccgccgccagcacaaagcaggtaatggcaatcggcagtcccatgccggttaacgcttcgcccagcgccgggccgacgccggagtcaaccagtacctgtttaaataccccgcctgcgccaatcaccagcagaataatgcccgccggttgtagcgcgtggccgcagatttccatcactttgtctttcggcatcccctggcgcatcgccaggccgtaaatcgctaccagacaagcgaccagaatcgcagtgaaggggtgaccgataaactcaaaccattcgtaagcggtggaaccttccggcacaaaacgcgcggcgatcgttttcagccctaccagcaccaacggcagcagaatcagcgacaggctgaagccgaaagaaggcattttaccttcacccagatgcggctcggtaatgtcgtcaggaatacgcagctcaacataacggctgataaaattcccccacagcggcccggcgataatcatgccaggaatggcggcgcacagcccaatcaggatcatccagccgaaatcagcatgcatctgggaagccagcagcatcggcgcaggcccaggcaacaaaaacgccgcggctgccgccacgcccgcaaacagcggaatgaccagcttcaccaggtttgtgccggtatgacgcgccatagagaatgccacacttatcagcagcacaatcgccacttcaaagaacagcggaagcgcacaaatcagcccggccaggccaatcgcatagtgcgcgcggttatgaccaaaggatttaagcattttcacggctatctgatcgaccgcgccggtttcatgcagaatcttgccgaacatcgcccccagcgcgaccacaatcgccaggaagcccagcgtgccgcccatccctttttccatggtcgcggcgattttatcaagcggcatccctgaaaaaagccccgcgcccattgagacgaccattaacgcgacgaaggcgtgcatacgcgccttcatcacgagaaacagcagcagtaagacggaaccgacggcggttaaaaccagtgttaatgtactcacagcgtactgcctttattgatgacctcaatggtgctcgccacgacgtcttccagcggctggtcgatatccaccaccagaacatcgcgttcgtcggcacccggctcttgcagcgtttcaaactgcgtcaccagcatctgggttttgaagaaatgacctttgcgcgctttcagacggctttcaatgacgtcgaaatcacctttcaggtagataaaggagaggttcgggtttccctcgcgcagcaggtcacgataatgttttttcagtgcggaacagacgatcagcgagattttattggttcgctgcatcgcgaaagcggcgtcgttcagcgcctgtaaccacggtttgcggtcatcatcattcaacggctcgccggaagccattttttcaatattgcagcgcggatgcagaaaatcgccgtccagaaacgcggcatgaagctgatgcgccacggcgcttgcgacagcggatttaccgctgcctgatacgcccatcagaacgtaaacgtggtgatcatgattagtcgtgctcaaagcgggcccccactctacaagttgcaaaatttgttacgggtaactgttatcggtaacattgtccaaccgcaccattcacgacgcaatgaccattcgtgccaaaagtgaataagtgtgagctacttcaaagttgtcagactaaatagatccgcccggtgacaaggtgaaacctaaatctaacattttcggcgtgaccgtttcgccgcgaatgcgggctaacaaacgttccgcgccaatgctgcccattcgctcgcgcggcgtcaggacgcttgccagacgcggttccatcacctggccgatgtcatgaccgtggaacccggcgatcgccatgtcgtccgggatttttagccccaggcgctggcattcgaaggccgcccccaccgccaggtcatcgttggtgcaaaaaataccgtcaagctgtgggtattcgcgtcgcgcctggcgcatgagttcgataccggaagagtaggatgaagattgctccatcatcacactgtaaggaaccaggcctgagtcccgcatcgcctgttcatagcccttctgcttgatgatagtacgttcgtcgaggcgcgcccccagataggcgatatgacgatgaccacgcgcgataatcgcggcggtcatctgacgggcggcctcgaagttgtcaaaaccgacggcaatatcgagacacggcgactggctgtccatcagttccaccaccggaatcccggcgacttcgatcatttttaaggtgcgcggcgtatgggtacgctcagtgaggatcaggccgtcgatattccaggagagcatcgattccaggcgctcctgctccatctccggtttatagccgtagtgcgccagcatggtttgataaccatgcgcgtcggtgacagcctcaatgccgcgtaacacttccgcaaagacctggttggttaaagacggcagcagaacgccaatggcgcggctggtggcgttggaaagaatgtcaggcgcgcgattaggaatgtacccgagctcatcaagcgcagccgcaattttaccccgcagcgcgacggagacctgctccggattacgcaaaaaacggctgaccgtcattttggtcacgcccacgcggtcggctacatcctgaagtacgggtcttttctttttcatcgtcctgaaaggtataaaagggatagatttgcccagtttaccacggacgtgcgtgaaccttcgcagagaaaaaaagtcgtttttttattgtgagaaatacacaaaatcattcgagttgcatcaaggcggcgacgcagtgacaaattcgtcaggaacgaatttgaacaaccgaaggttgcctctggtgagggacaaggatgtccctcagtaaatccccgggagcgtacattaagtatgcgaccggggtgagcgacaaatctgccgggagcagatttgaacgctgctcgcagcggccccgaaggggcgaggcctatggatgggccgagtaataaagccaacacagatgcggcttgaaggatgacgtgtatttttagactggcggcaagtcaaacaacaacacttcactgtcgctatcggcatgaatcgagattgcctgctcatcccaaatcgccaggccgtcgctggtggtggctttagtaccgttaatggtcacgttaccttttaccacctggatccagacgcggcgctcagcggcaatctgatgcaccgactgctcatctttgagcagcgcccagcggtacagctccatatcctggtggaccttcagcgaaccatcgcgagcatctggcgaaagcaccagttgcttgccctgcgcggcgtcgaagcggcgctgttcgtagcgcggcgtgatgcctgtttcttgcggaatgatccagatctggtacagccgcagacgatccgttttgctcgggttgtactcggagtggcgaacgccggtcccggcgctcataatctggaattcaccggccggaacctgttctttattgcccatactgtcctggtgttctacggcaccttccagcacataggtcaaaatttccatgtctttatgcggatgcgtgccgaacccctggcctgcgtcgatcacatcgtcgttaatcacacgcagcgccgagaaccccataaagttcggatcgtaataatcggcaaaagaaaaagtatgccaggagtcaagccagccatgattcgcatgaccgcggtcgtttgctttgcgtaagtagatcattgtgttcatccccagatgttttcgatggaataagtgtggactcattccgtccgggatcatagagggtgaaaattgactcctctgttcaaaaaatatgaataagcgcagaggagtctgtaagggctatttagcgagggttatcgtcgcaggcgatgcctgttcgaaagcacgctcgaggatttccaggttggtaagaacttcagattccttgacgtaattaggcgtaccgacggtcaacgtctggtacagcgcatcatagacgcgaccatagtcacccgtttccggtttcacctcttctttcacggtcacgccgtcatcgttaacatattccagcacgccgacggattcgtcagcggcgaaaccgggttcaccgggcataatgttcgctttcaggctggtttcttgttgatcgataccgtatttcacaaacgaacctttggtgccgtgaacaataaacttcggatagtcgattttcaccagatggctggttttaacgatagccttcaaatcgccataaaacagttgcgcttcaaaggtgtcatccggattcgctttattacgcaggctacgaatgtcatacgcgacatgatccgggcggccaaatagcgaaataatttgatccatggtgtggacgccaagtccatagaatgcgccgtcctgcggcaggcccggtttggtttctgctaccgggcggtaataatcgaaatggctttcaatttcgacaatcttgcccagtttgccgctctctatcgcttttttagccgtgagaaaacaggaatcaaaacgacgattctgatacggcgtaacggtcagtcctttgcttcgcgccaggtcgaacaacacttttgcctccgccagcttcggcgtgaaaggtttctcaaccagcacatttttacccgcttccagcgcgcgtttggcgtattcgaaatggctgtcagcatgcgtacagacgatcaccagctttacctgcggatcgcccaacacctcatccagatcgttggtgaagtgaatatgtgaatactgtggcgcctgctcttccggtttagcgtgacgacggaaaatatgcgcgacatgccaggtatctttacgattcagaacataggggagatggtaacgggtggtacttttgccgaatccaataaatgcgcagtgtaaggtcatgagacgatccttttgaagatgattgtttacaccatagcgcaaagcgtgaggagactgaatgttggattctttgccggatgcggcgttgcctttttgggcctacaaaagcagatgcctcaagatcgggcgtaagtggcgcaggcagattgttcacggcaagcgcgcagggcccggagcgtactaaatgtacgtgaggagcacgagcacttcccggggacaaaatgacaagtaagccaggctgaaacaaaacccaaaaaaaaagccagcaaaagctggccaaaataatactggaagcaatgtgagcaatgtcgtgctttcaggttctccgtaggggttcccctgaacgcaaggcaataataatcattctcattcgcacttgtctacttctttttgcaaaaaaatgcagttgacggaattttctttctcagcgagtgtaaatacacaattccccctgcaggagataaggaatgagtgaaatagtgatacgccacgctgaaccgaaagattacgacgccattcgtcagatccacgcccagccggaggtgtaccacaacacgctacaggttcctcatccttccctcgaaatgtggcaggcgcggctaaccgagcaagccggggttaaacaactggttgcctgcattgacgatattgtcgttggccatctttctattcaggtcacccaacgtccccgtcgcagccacgtggccgattttggtatctgcgtggatgcccggtggcacaatcgtggcattgccagcgcgctgatccacaccatgatcgacatgtgcgacaactggctgcgcgtcgagcgtattgagttaacggtgtttgttgataacgagcccgcggtggcggtgtataagaagtacggctttgaaatcgaaggcaccggtaagaaatacggcctgcgcaacggtgagtacgttgatgcgtactttatggcgcgcgtgaaatagcgcttccccgccccaccctgtggggcgaaacgtcacaaaccttcacaacatcccagttattgcaacctacttcccctatatcaaaacaataaccacctgaatttcatggttattgccgctttaagctttatcaccgttttttccgtaattttagcaatattaatattacatttttgtttttttttggtttctgccatcactttatggtgacaatcacaacaatatactcctcccgggactaatttaaccacggtgaggtaaaaaatgaaatttgaacgccatcatagaatattgaaggaactcagtatttcgggagttgtaaaagtttcaaatctggcgaaaagtctcaaggtaacaaaggaaactattcgttcagatctcaatgaacttgccggacagggatatcttactcgctgtcatggtggtgcatttattacccttgattctcttgataacgtcgcaaaaaatgaaattgcttatgtgctggaaaaatatgaatcagcgcagaaaataaaaaaaggtctctctgccatgaaaaataatgtatgtgttattggctcgttcaatgttgatatcatcagttatctaccgagattaccctcaacgggagaatcattgctggccgataaatttattttttcacccggcggtaagggatgtaatcaggcattagcagcaagctatgccgactctgatgtgcattttattactaaagtcggctcagatcattttagtgattacgccattaattttataaactcatcaaaaatccataaaagtgttatctaccagaccaaagaaacacaaacaggtacagcaaccatcatggtgaatggagataccggagataacgtcatcgctatctaccctggcgccaacatgacaatttcccctgatgaaatcaccattcagaaagaagccattgttcattcagatattgttcttgtccaactggagacgaattacgaagcgctgcagcaaacaattcgtctcgcacaaaaaaatgacataccggtcatcatcaatccagcgccgtacaatgacatggttaacaccatcattgataacattgactatattacgccaaatgaaacggaagcaggcctgctggccaatatggcggttaatgatatcgaatcagccaaatgcgcggccaaaattattcaccagaaaggcgtcaaaaataccattattacgttaggtagcaaaggttcgcttgcttatgatggcacacaattcatctattccccggcatttccggcggttgtaaaaaatactgcgggagcgggtgacgctttcaatggcgcactcgcatctggtcttgcaaaaggaaagtcactggcatccgcattgtgctacgccagcgcatttgcctcacttgcggttgaaacgcctaatgcctctgatatgccggaaaacgactccgttcttcatcgtattcagggttcacattacaaacaaactatctctactcactaaatcaaggagcagactatgaacaatacgcagaaaaaactaaaggtgctctttattggagaatcctggcatattcatatgattcattcaaaaggttatgacagtttcacctccagtaaatatgaagaaggcgctacatggttactggaatgcttgaggaaaggcggcgttgatattgattacatgcctgcccacacggtacaaattgcctttccagagagtattgacgaattaaaccgttacgatgtgattgttattagcgacattggtagtaataccttcctgttgcaaaacgagacattttatcagctaaaaataaaaccaaacgctctggagtccattaaagagtacgtcaaaaatggcggtggactactcatgattggtggctatctgtcgttcatgggtattgaggcaaaagccaattataagaacaccgttcttgctgaggttctgccagttattatgcttgatggcgatgaccgggtagaaaagcccgatggtatctgtgctgaggctgtctcacctgaacatcctgttgttaacgggttctcagattatccggtatttcttggatataaccaggccgtcgccagagacgatgccgatgtcgtattaacaataaataatgacccattgttagtgttcggtgaataccaacagggtaaaaccgcctgctttatgagtgactgctccccacactggggaacccagcagtttatgtcatggccgttttataccgacctgtgggtcaacacacttcaattcatcgccagaaaataaaaaacaatggagtaacgaaagttactccttttataaaatataaggattgatgtatgaacaagaataagtactcaacccccttactgatgcttgccaccatcttagccggtatgctttccccgatgcagtctgccgttaatgggcagttaggacattggttacaagacggtaatgcttgcgcagtaatctcgtttgccagcggtctggtcgtcatgttttttattattattgcgcgcaaagaaacacgccagcaattcgcctcaatccctactctgattaaaaagagaaaaatcccgctatggaattggtttgcaggattatgcggggcgatggtcgtattttctgaaggcgcatccgccagcgcgctgggcgttgccacctttcaaacggcattaatttccgctctgcttctttccggcctgctgtgcgaccgttttggcatcggtgtggaggagaagaaatattttacgccatggcgcattactggcgcattattcgccgttatcgccaccatttttgtcgtgtcgccacagtggcactcaacctcgtttatcctgctcgctatcctcccctttttggcagggttactcgctggctggcagcctgcgggaaatgcgaaagtcgccgaggcaacgggctccatgctggtgtccattacatggaacttcatcgtcggcttttgtgtcctgggcgcggcgctggcgatacgtatcgcattaggccatgtcaccattcagttacccgatacatggtggatgtatctcggtggtccgctgggtctgctgtccatcgggctaatggcgattctggtgagaggcttagggctattgatgctgggcgtagcgtcaacagcaggccaactgcttggctcagtgctaattgatgaattgatcccttcattaggcaatacggtctacctggtcaccatcatcggtacgctgttcgcgttagtcggtgcgattgtgaccaccatccctgaatacagagcatccaaaatggcgcaaagaatagaggtgtcagaatgaaaggtttcctgcaaaccgtaacaggcccggtggcgcatacggatatggggctgacgctaccgcatgaacatctgtttaacgatctgtcttcggtcgtagacgagccacattatgctttttcacagcaactggtgggaaagaaagtcagtgctgacctgcagtgggggctgaaacacgacccatactgctgcgccgataacatggaccgcaaagagattgatgatgttatcttcgaaatcaataattttatgtctttaggcggcaggacgattgtcgacgccaccggatcagaatccattggacgggatgcctcagcgctgcgagaagttgccttaaaaacgggtttgaatatcgttgcgtcatccggaccttatctggagaaatttgaaagtacccggatccataaacctgttgagctgttagcctcactcattgataaagaactgaatcagggtattggcgagacggatattcgcgctggcatgatcggtgaaatcggcgtatcccccgcgtttacccaagcggagcgtaacagcctgcgggcagcgtctctggcacaatgtaacaacccccatacggcgatgaatatccatatgccggggtggctgcggctgggggatgaggtgctggatatcgtgctggaagaaatgaacgtctctccggcaaaagtctcgctggcgcattcggacccttcaggaaaagatgtcgtctatcaacgtaaaatgctcgaccgtggcgtatggcttgaatttgacatgattggtctggacatcaccttcccaaaagaaggtgtcgcgccgggcgttcaggagaccgcagatgcagtagcgaatctgattgtactgggttacgccgaccaaatcgttttaagccatgatgtttttctcaaacagatgtgggcgaaaaatggcggaaatggctgggggtttgtcccgaatgtcttcctcgcctatctggctgctcgcggagtagacaacgatactctgcgcaagctttgtattgataatccagcccgattactcacggcataatctgcaaatagcccggtgtctgacaccgggcctggaattaaaaatcagtatcccgccgttaaatcatccaccgaacgcgggtcagacgcaccgtacagttcgccatccgggccaaccataatactttgggtactgcccatcgcttctttcagcgcgactttctgccctttctgttccagcaacttcagcgtatcgggactgaagcccttttctacccgcagttcgtccggcaaccattgatgatggaaacgcggcgcgttggtcgcttcggcgacgttcatgccgaaatcaatgctgttcactaccatttgcagtacggtagtgatgattcgactcccgccagggctgccggtcaccagccaggttttgccgtcttttaccacgatagtgggcgacatcgacgacagcggacgcttcttcggaccgaccgcgttagcatcgccgcccaccaggccataaacattaggtacaccgggtttagcagaaaaatcatccatttgattattcagcagaataccggtatttcccgccacaattcctgtgccgaaggtggtgttcagggtataggtcaccgccacagcattgccgtctttatccaccaccgagaagtgggtggtctggttgctttcatacggggcgagcttgcccggttttatctggctggaaggtttggccttgttgatatcaatttgatcggccagcgttttcgcataggctttgtgggtcagcgcctgccacggcactttcacaaagtccggatcgcccagatactctgagcggtcagcgtaggcgtatttttccgcttccgccatgatttgcatggcatcggcgctgccaaagccgtacttcttcatgtcgaaattttcaagaatattaaggatctgtacgatgtgaataccgcccgaggatggcggcggcatggagaagacctgatacccgcgatagtcaccgctgattggcgtacgctcaacggctttatagttggctaaatcctctttggtcatcagaccgccgttcttctgcatttctccggctatctggtcagcaatcgcccctttataaaacgcatccgggccgttttcggcaatcatttccaggcttttcgccagattcttctggatcagcttatcgccttttttcagcggctcgccgtctttccagaaaatggctttgctgttctcatggttggggatcacttcgctgccgtaagtttttaagtcgtcggccagcgcatcgttaaccacaaaaccctcttccgccagcttcatcgccggacgcaccactttattcagcggcatcgtgccgtatttctccagcgccagcgagaaccccgccacggtacccggcgtaccggatgccagatgcgacgtcagcgactttttcgcatcggcgttaccctgatcgtcgaggaacatatcacgggtcgcgccagccggcgccatttcacgaaaatcaatcgccgtagtgttaccgtctttggtgcgcagcagcataaatcccccgccgcccagattcccggcttgcggatgcgtgacagccagcgcatagcccacggcgacggcggcatccacggcattaccgccctgctttaagatatccacgccaacctgcgtcgccattgcatccaccgaggccaccatcccttgcgtcgcccgcacaggatgaaagacatcttcttcaacaccataggagactggcggcgcgacgggaggattggccaccgcgctaaacgtccccccggccagcagagcggcgatcgccacccagcgcataaacgttggtttcatcgttgtttttctccagataaatgggtgtatgtcccgtttaatcctggtccacaacgcttaaaaaatcatcatcatggcgaaatagaggtacacttaaaaagaggcctcatcgggaggagacgacaatgaaacgcttactacttattacggctttgttaccctttgctgtattggcccagccaattaacactatgaataatcctaatcagccaggttatcagatccccagccagcagcgtatgcagacgcagatgcaaacgcagcagattcagcagcagggtatgttgaaacaacagatgcaaacgcaggcgcgcagccagcagcaaaatctacagtcgcagttgaatgccaatacgcagcgggttcagcagggacagccgggcaacggtatgctcggtcagcaaacgctgcccaatacgcagggcggaatgctcagcggcagcggaaatccggaccagatgctaaaccattcccagccaatgttgcagcaggacagcgggacgccgcagcctgacatcccgctgaaaaccatcagcccttaaaactgacggcccttaaaactgaaagtgagggccgatgtcatcaatgcgatcggtgcagatacaatccacgccccagcgcagcagctctgccgcccgctgggactgattgacggtatacaccagaatccgcagacccgcggccttaatctcttgcactcgcgtctcatcgagtaatttatggttgagatggagggaaacacagcccagacgggtcgtcagttcacgccagtcttcacgccatttatccagcagtaacccgcgcggcagttcaggtgctgccgcctgcgccgcttccagcgcctctatctcaaaggaagaaagcagcggcggcgtcatcccggcccacagttcgcgggcggccgacgccacgacgcgtcctgttagccttccgctccccgttgtcggtttgatctcaatattcgccatcatgccgtgtttacggcagcgctccgccacctgcgagagcaacggcagcggctcgcctttaaattcgccgctaaaccaaccgccagcgtccacacgcaataaatcctgccagttcaactcgcccgccacgccccaaccgttgctggtgcgctccaggttatcgtcatgcagcaggaaaatttcgccgtctttcgacagcttggcatcaaactcaatcatggtgtgcccgtatcgcgcgcccacgtcaatcgccgccagagtgttttccggcgccagtttaccgccgccgcgatgggcgacaatgtggggataaggccagttactcatacacgttgtcctgtttcgccatcaaaaagatgccgctgatgttccggcagatgcagccatagcatactgcccgccgccgggcgttgctgatgcgccaaccgcaccaccagtttctgatcgccccagcgcccatgcgccagattatccgcgcccagaatctccagcgtatctaccgttagcggcacgccgccttccgcctgcgagcttaacgcaatatgctccgggcggatacccagcgtcattttacgtccggcatgaccccgatagcccgcaccaatcggcaacgccagaccgccaggcaattcgaaacggtcgccggaagcgctgataacaccatccaacagattcatcgccgggctgccaataaagctcgccacgaagcgactggccggtttttcatacacctctaccggcgtgccaatctgttctgcgacgcctttattcatcaccatcacccgctgggccagcgtcatcgcctctacctgatcgtgagtaacatagagcgaggtggtacgaagacgacgatgcagatgttgtaactccagacgcatctgcacacgcagcttggcgtcgaggttagagagcggttcgtcgaataagaagactgccggttcgcggacgatcgcgcgccccattgccacgcgctgccgttgaccgccggaaagctcgcgtggacggcgtttaagcaggccgtccagctccagaatgcgcgccgcctcccgcacgcgttcttcaatatgcgctttgctcataccgcgaattttcagcccccacgccatgttctcctctacgctcatatggggatagagagcatagttctgaaataccatcgcgatgccgcgatctttgggctccatctcggtgacacgtttgcgatcaatccagatatcgccgctggtcacgcgttccagaccggccaccatccgcaacaacgttgatttgccgcagccggacggcccgaccatcacgataaattcgccatccgccacgtccagcgttaacggttgaatgacctgggttttgccgtcccagcttttggttactgcctgtagttttaaaccagccattttatttctcactatcgaccaggccacgcacaaacgcgcgctgcatggctaacacaattacgaccgggggaatcagagtcagcagcatcgcggccatcacctggttccattgcgtggtaccttcgccggtggcgatcatccctttgatacccgctacggcagtgccaagattcacgtcggtgataatcaacagcggccacagatactggttccagccgtagataaaggtgatgacgaataacgccgccaggttggtttttgacagcggcaacacgatgtcgcggaaaaagcgcatcggcgacgcgccgtcaatacgggccgcctccaccagttcatccggaagcgtcataaagaactgacgaaacaggaaagtggcggtagcggacgccatcagcggtagcgtcagaccggcatagctgtcgagcattttcaggttggcgatcacttccaccgtcgggaagatacgcacttcaaccggcaacatcagggtgataaaaatcatccagaagaacaggttacgcaggggaaaacgaaaccagacgatggcgaatgcggaaagcatagataccgtgattttgcctaccgtaatgctgaacgccataatgaaactgttaagcatcatcagccagaatggcgcgctattaacaccgacgccgttgacccaaatagttttgatattctccagtaactgcgtgccgggaagcagcgtcatcggcgtctcaaacaccgcgcggtcgtccagcgtcgccgcgacaaacgcgacatacagcggaaacaaaatgaccgcgatccccagaatcagcatggtatggctgaatattgtcagcccgcgacgattctctatcattggtaacgcaccttactttccacatagcggaactgcaccaccgtcagaatgatgacgaggaacatcaacaccaccgactgcgcggcggacgccgagagatccaggccggtaaacccttcgcgatagatcttataaatcagcgtcgtggtggcttgtaccggcccgccggcggtcgcggcgtcaatcaccgggaaggtgtcgaaaaaggcgtacaccaggttgaccaccagcaggaagaaactgaccggcgcaataagcggcaaagaaagccggaagaaacgacgaatcggcccggcgccgtcaatggccgccgcttccaccagcgagcggggaatggattgcagcgcggcaaagaagaataaaaagttgtaactaatctgcttccagactgacgcaaataccaccaggaacatcgcctgaccgctgttttgcgcgtggttccagtcatagccgaattcgccgaggaaatgggtgattaatccccgccccgggttaaacaggaaaatccacaatacggcggcgacggcgggcgcgacggcataaggcagcagcatcagcgtctgataaaaacggctgccgcgcaccacgtaatccaccagggcggcgaaaaacaacgagaccagcaggccgctaaacgtgaccagcgcgctgaatttaatcgtcgtccagaaggcatcgagataataactgtcgtgaaaaagcgcgacgaaattctccagcccgacaaattggctggaaaaaccaaacggatcgacgctttgcagcgaataccacagcgcttcgcccgcaggccagataaagaaaataacggtgataaccaactgcggagcaaccagtaaatacggcagccagcgcgagcggaacaccggacgggatgatgacatgaagattcttttcctggaaggtgccggatggcggtgcaagcaccttatccggcctacaaacgctgtaggcctgataagcgcagcgccatcaggcacttatacacttaagatttgctcgctttctcaaaacgacgcagtaactgattcccgcgatccaccgcggtatccaacgcctgttgtggggttttcttcccggtccagacgctttccagctcttcgtccacgatggtacgaatctgcggcatattgcccagacgcaagcctttggtgaagggtaacggcggcttattcaacatctggcgagtggcgatatccgcaccggggtttttatcgtaataaccctgctcgcgggtcagctcgtaggcggcggtggtaatcggcaggtagccggttttttgatgccattcagcagcgttttccggttttgccaggaagtcgaggaatttggcgacgccggtataggtttctttatctttaccctgcatgacccataggctggctccgccgataatagcgttttgcggcgcgcccttgatatccgcgtcgtacggcatcatacccacgccatagttaaatttggcatactggcggatattggcgagcgagccggaggacgcggttgtcatcgcgcagtcaccgttataaaacttctcggtagactcgtccttacgcccaacatagctaaaatcgccttttttattcatctcttccagcagcgcgatatgtttcacctgctctggcttattaaactccagcaccgcatctgtaccgtcaaaaccattgtttttactggcgaaggggagaccgttccaggcgctgaagttttccagttggatccagccttgccagccgctggcgtaaccgcatttcatgcctgccgctctcagtttcgcggtatagtcagccagctcctgccaggttttcggcggctgttccggatctaaaccggctttcttaaaggcgtctttgttgtagtacagtaccggcgtggagctgttaaagggctgggagagcagatgcccgcttttagcatcggtgtagtagcctgcaacggtcggtacaaactgggactcgtcaaagttaataccggcgtctttaaacacttcataaaccggcttaatggctttcgaggccatcatggtcgctgtcccaacctcataaacctgcaatattgccggcgcgttgccggtacggaatgccgcgatcccggcgctcaggttctgttcatagttccccttatagaccggaacgattttgtaatccggattggcctggttgaaacgttgcgccagtgaatcaacttctttgcctaactccccttccattgaatgccagaatggaatagtggtgacggccaacgtctgacccgtaaatgccagactcagcgccagtcctaaagctgtatgtcgtaacgatatcatcggttatctctctttttgtgccgggatgcgcgatatcacgcgttttatgttcgcgggggtaacatgacatgctcgaatgacagaaaaataacttttttattacaaaaaaaagatagtaaggcgacagagagatggcaaggcagtgaaagcgccggaaaagaaaagtgggagctacggcacggataggtacgacattattcccgggggcggcgcacatgccgtaactcaaccaggcggagcgtcgccgggattaacgtctcaggcgcgtaagcgaacgacaatttgctccagcgtaagccgccctgccgccgcatcgactgtcatatcgacaaaatccggattcgcagcgagtgagatcccgttacgctttaaaaacagcagcgtaataaataaggcggtacgtttgttaccatcattgaagatatgcccacgggatatagcgagcaaatgcattgccgccagcagccacacgtcggtcaccccttcatattcgatttgattgagtacccggtacattagcgcttccgcgcggccaggatcaggcatgcctgttacaccaggcgtaacgcggagaagcctgtcgtgaaactgaattatctcttccgctgagataagttgtagggtcatttatccgccagctccctgagctcattgccatgaaccgccataatggcagcaaactcatcatccattcgcgccgtctgataacgctcaaactcctcggcgctgatgatcactgcggacttatgcccacgacgcgtgatggtgacagggcccgccgtcaccgcgctttccaggacttcggccagattttgccgcgcttcgctatagttaaccgtacgcataaacatctccccagttgtacatgtttattgtacaacaaacacgtacaaaaaaagagccatcaggctcttttgaaaaattttaccgcttgccgttaccgggcgcggcgcacgcgcttccccctggcacagtctaaccgcccagataggcgctgcgcaccgcttcgttcgccagcagtgcatcaccggtatcggatagcaccacgtggccgttttccagcacataaccgcggtcggcgagcttcagcgcctggttagcgttttgctcgacaaggaagatggtcataccctgctcgcgcaactgctcaatggtgtcgaagatctgctggatgatgatcggcgccagccccagcgacggttcatccagcagcaatagcctcggctggctcatcagcgcgcggccaatcgccagcatctgctgttcgccgccggacatggtgcccgctcgctggatacggcgttcatgcaggcgcggaaacagctcgtacacccatttgatacgctcctgaaaccgatcgcgctcggcaaaaaaaccgcccatcgccaggttctcttctaccgtcatccgcgagaagacgcgccgcccttccggcactatcgccaccgcttcacgcatgattttcgccgtctgccagtcggttatgtctttaccgtcaaacaccacccgtccgctggaggcgcgcggatcgccgcacaaggtgccaagcagcgtcgttttccccgcgccgttagcgccaatcagggtaacgatttccccctggttgatgtgcagactgacgtcgtgcagcgcctgaatcttgccgtagtgggcgctgactttttcaaacgttaacatcgttttttccatcttatgcctcacccagataagcgcggatgacgtccgggttgttgcggatctcttccggcgtgccgttcgccagcggcgtgccctggttcaccacgtaaatgcgatcggaaatgcccatcaccagcttcatatcgtgttcaatcagcaagatagtggtgttgtgatggttacgtagttcggcaatcagctcatccagctctttggtctctttcgggttaaggccggccgccggttcgtcgagcatcagaatttctggctgcgtcaccatgcagcgggcaatctccagccggcgctggtcgccgtaggccagattactggcctggcgattggcatgttccagcaggccaatacgctcaagccaagtcgccgcgcggtccagcgcttcactttgcgcgcggcggaaagcgggcgttttcaacaggccggaaaagaggcccgttttcaattgctggtgctgcgccaccagcaggttttcaatcaccgtcatttcacggaacagacgcacatgctggaaagtacgtaccacgcccatgcgggcgatctgctggcccggcaatccttccagatgccgctcgcgcaacatgatcgtaccgcctgtcggcttataaaaaccggtcaggcagttaaacaccgtcgttttacccgcgccgttagggccaatcagcgacacaatttcccgctcacgcaattccagcgatacattgttgaccgccagcaaaccgccaaagcgcatcatcaggccgttaaccgctaataatggctgactcatgcctgctctcctttcgcctgaccacttttcagcttcaactgcggacgcgtcatcggcagcaatccctgcgggcgccagatcatcatcaacaccatcaaaccgccgagcatcaacatgctgtattcgttgaaatcgcgcatcaactcgcgcgacaccaccaacagaaccgccgccaggatcaccgcaaactgcgagcccattccgcccagcaccacaatcgccagcacgaaggcggattcggcgaaggtgaaagattccgggctgacaaagccctggcgggcggcaaacaacgtcccggcgaaaccggcaaacgcggcgctgatagtaaaagcggtcagcttgatgcgcgtcgggcttaaacctaatgagcgacaggcgatctcatcctcacgcaacgcttcccacgcccggcccagcggcatacgcagcaggcggttaatgacaaacagcgacaggaccaccagcaacagggccaccagatagaggaaaatgacccggtcggatgggtcgtacttcacgccaaagaaattgctgaaggtatcccagccgccttctcgggtgttgcggctaaactccagaccaaatagcgtcggtttggggatctggctgataccgttcgggccgccggtaatttccgtgttgttgagcagcaggatacggacgatttcgccgaagccgagcgtcacaatcgccagatagtcgccgcgcagacgcagtaccgggaagccgagcaggaaaccagcagcggcggagaccagtcccgccagcggcaggcaggtccagaaacccaaaccataatagtggttgagcagcgcaaaggtataagcgccgatggcgtaaaagccgccgtagcccaataccagcaggccggacagccccaccaccacgttcagccccagaccgaggatgatataaatcatggtcatagtggcgatatccacgctaccgcgcgacaccataaacggccacgccacggcgataaccaacagcgccatcagaaacagcttttgcttaacggtagagccatcgatcgccggcagaataaacttcggtccggagacgtgcttcaccgctttctggaacatcggacgcagcaactgaaagaaaaaaaccactgccgtaccgataaagatccactgccagcggatgtcggcggcggtatccaccaccagtttggtgccgtccagctccagttgtacgcccatgaagacgccagccagaacgaagaacatcgccgcagagaacagagccatcgcaatatgcatcggtttcatactttctctacctccggacgccccaggataccggtcggcatcaccagcagtaccagaatcagcagagcgaacgatacgacatctttatattcggtacttaaatatgcagacgagagcgcttcggcgacgcccaaaatcagaccgccgatcatcgcgcccggaatgctgccaataccgcccagcaccgccgcggtgaacgctttcatcccggccataaaaccgatgtaggggttaattacgccatagaactgaccgagtagcacgcccgccaccgccgccattgccgcgccgataacaaacgttagcgcaatgacgcggtcggtattaatgccgagcaggctggccatttttagatcctccgcgcaggcgcggcaggcgcggcccatccgggagtagcgaatgaaaatggtgagcgccagcatagccagaaaggtgactatccagataaccgcctgcatggtggtgatggacgcggaaaagttttcgctgctgcccacaatccactggccgttaaacaggctgggtaacgccacgtcgcgcgaaccttccgtcaggctgacgtagttttgcaggaagatggacatcccgatggcggaaatcagggcaatcaggcgcttggagttgcgcacgggccggtaagcgactcgctcgatactccagccgtaggcgctggcaataataatcgcgccgataaatccggcggccaccaggagccaactggtgtctattcccatcatcattagcgcggcgatgatcataaaagagacgtagctgccgatcatatacacctcgccatgagcgaagttgatcatgccgataatgccgtacaccatcgtataaccgatagcaatcagcgcgtaggtgctccccagcgtgacgccgttaaacatctgctgcaagaaatagagaaactgctcggacataaggtaacctttttaaacccgcccggcgtgcgggcggtgggataacttatcttctggcattacttcgcgacggttgacgagccgtcggcgtgccactggaagacgccaaattcaaatcccttaagatcgcctttttcatcccatttcagcggcccaataacggtatcagccccgttagctttaagatctttcaccagatccagcggagcatggctggcgctacgcgtcattgcggtcgccagtgactggacggtggcgtaggtgatccagacgtacggaccgctgggatctttcttgtcggctttcagcgcttcgacaatcgctttattcgccgggtcctggtcataacgttttggcatcgtcaccaacatgccttccgccgcaccgcccgcaatattggacagcgacgcgttacctacgccttccggccccataaattgcgttttcaggccattagcccgcgcctggcgcagcatctgccccatttccgggtagtagccgccgtaatacacaaagtcgatattctctttttgcaagcgggcaatcagggcggagaaatctttttcaccggcggtaataccatcaaaaaagacaatattggcattgccctgcttcaggccatcctgcacggagcgcgccagtccttcgccgtattgctgtttatcgtgaatgatagcgatgcgctgcggcttcaccgtttccaggatgtatttcgcggccgttggcccctgggaggagtccaggccggcggtacgcataatgtactgatagccgcgctgggtcagctccgggttagtcgcccccggagagatcatcagaataccttcatcttcatagatatcggatgctggctgagtagaagaagaacacaagtgaccaataacgtactgaataccgtcgttaacgattttgttggccaccgccaccgcctgttttggatcgcaggcatcatcgtactctacgccgaccagcttatcgcctttaataccgcctttagcgttgatgtctttaatggcctggcgcgcgccgttaaattccatatcgccccattgcgctaccgggccggacatcgccccgactatggcgactttaatatcatctgccattgccccctgcgagactgctaatgcaacaatccctgcgattattgttttcgctttccgtttcatgtgcctgtatccccattcgtgatgttatatgttttgtttttgctggttaaaaagcagactgtactttttataaatggtgcgctttttactgactcattaatgagttagcgcagcatttaaagcataataagattaaaatctctatttttcagtctattaagaaaagataatattctgcttttcgctatagataaacaaaaaaaagcacgcttgtcagcataaaataacggcatattaagtggaataattcactagcattcagggaattatgctgcctgttttccattctctaatgcttcaaactgtaattatcgttgttaaaaaattaataacctggtaaatgacacaaaaaagagaaagcatctggcctgcctgtttcggtacactgatcgcatcttttgaaatcgggacaagccgtcgatgaagctgactattcttcgtttagaacactttagcgctcaggatcagatcgatctgggcaaaatctggccggaatattccgcctcctcattaagcgtagatgaaacgcaccggatttatgccgcgcggtttaacgagcgtttgttgggcgccgtaagagtgacgctgagcggaacgcagggcgcgctggattccttacgcgtgcgtgaaatcacccgtcgtcgcggcgtcgggcaatacctggtagaagaagtcatccgcgataatcccaacgtctcgtcgtggtggatggcggatgtcggtgttgaagaccgcagcgtgatggccgcgtttatgcaggcgttaggttttaccgcccagcatgacggctgggagaagcgctaaaagaaagccggatggcgctgacgcttatccggcctacatgccgggagaaaagataaaaaccacctcgcaattttccaagaatttcgcgttgcaggcaggcggcaagttatgaaatccccgggagcttacataagtaagtgaccggggttgaataacgtagccaacgcacctgcagcgcgaaaggcgccaggaaaatcacttggcgtctgtcgccgtaccattcgcatgccagtcaaacacgccgaactcaaatcctttcagatcgcctttctcatcccacgacagcggtcccattacggtgtcgaccgtggcgcctttcaggtatttggcaatttccgccggatcgtcagactggttcagacccgcctgcaacgattgcagcgcggcgtaggtggtccagacaaacgcgccgctaggatcttgtttcttggctttgatagcatccacaatcggtttgttcgccgggacctggtcgtagttcttcggtttggtgaccagtaagccttccgctgactctccggcgatgttagacagcgacacgttcgccaccccttccggccccataaactgggttttcagccctgcggcgcgggactggcgcaggatctgccccatttccgggtgataaccgccgtagtagacaaagtcgatattctcttttttcagacgcgctaccagagtggagaaatctttttcgccggcggtgatgccgtcaaagaatacgacgttaacgccgcctttcttcagaccgtcctgcaccgcgcgcgccagcccttcgccgtactgctgcttatcgtggataatcgcgatgcgctgcggttttaccttctccagaatatactttgccgccgttggcccctggtcagagtccagaccggtggtgcgcaaaaccagcttatagccgcgtgcggtcagctccggcgcggtcgccgccggggttatcatcaggatgccttcgtcttcgtagatatcagaggctggctgtgtggaagaggagcataagtgtccgataacatacctgatgccgtcgttcaccactttgttagcgacagctaccgcctgtttcgggtcgcaggcgtcgtcatatttcaccgcgacgagcttatcgcctttaataccgcctttcgcattgatatcggcaattgcctgctccgcaccggtaaattcctggtcgccatactgcgccaccggaccggacatcgcgccgacaaccgcgactttaatgtcctctgcgaatgccatatggcttaatgacagggcgatacatcctgccaataacgttttacccttcatattcatcctgataatccccattattctggttgttacgtgtgttgtggtgttattgttcagcactttatttcgattattggctagctacccgtgctttagcagcatactctgctaaaacatacccgatttttattattttggaatagctaaatttacattcagataacagatttgtgtcggtgggggagaggaagggtccgtaggcccgataagcgaagcgccatcgggcaaacgtgttgccggatggcagggtaaacgccttatccggcctacaaaaaacaaaacccccgaattcacattcgagggttcattggcaattcgcgaagattacgcttcgatcgcagcgcgaagctttttcatggcgttcttttcaagctggcgcacacgctcagcggagacgccgtaacgatcggccagctcctgcaacgtagacttattgtcttcgtccagccagcgagcgcggataatatcctggctacgctcgtcgagcccctgcatcgcgtcggtcagtcggttggcggcctgctcttcccagttatcgtcttcaatgccgtcggcaaagttagacgatttatcctgcagatacagcaccggcgccattggctggctgtcggactcatcgtccgaagacatgtcaaacgtcatgtcctgcgccgccatacgcgactccatctcacgcacgtctttactggaaacacccagttcgcgcgccaccatttcaacctcatcctgattaaaccagcccagacgctgcttggttttacgcagattaaagaacagcttacgctgcgctttcgtggttgcgactttaacgatacgccagttacgcagcacgtattcgtgaatttctgctttaatccagtgtacggcgaaggaaaccaggcgcacgcctacttccgggttaaaacgacgtacggctttcatcaggccgatgttgccttcctggatcaaatccgcctgcggcagaccatagcccgcatagttacgagcaatatgaacaacaaagcgcaggtgagacaggatcagcgttttagctgcttccagatcgccctggtaatgcagcctttcagccaatgcccgctcctcgtcagccgataacatcggccacgcgttcgccgcccggatataagattccaggttgccaacaggggctaaagctaaattttgcatttctttggtcattcaaatcctctcaatcagtattgcctggcaccgtcagcgagcaacaaccgtgccaaagccgatgagcaacgagaatatcatccactcttttatcagacagtgattttatccacaagttcaatgtaacactgtgcataatttacacacataatgtgacatgaagatgaaacgcggggaagagacaacagggactctttccctgcgaacggaagcccattgcagggaaagattataccacgattttatcaatcgggagtaaagtgacgtaaatgttgcaccgtagccagccaggcggcgatccagccaatcatggaacagaccagcagcagcaacaggcactcatcgaacgataagccattgagatcaaacttcgtgccgaagacctgcgccacttcagtcaccgccgatgataaacgcatcaccaaaatttcagacaatatcagtgaaagaaacgcgccggaaaaaccgagcaacgcgccgccgtagaggaacggacgcaggataaagccatcggtcgcgccaatcagcttttgcacgttaatggtgtcgcgacgggcaaaaatgctcaggcgcacgctgttgccgataacgaggaagaccgccgcgaccatcagcacgccgatcatcgccgacacgcggcccaccagcccggtgagcgccgccaggcgcgcaaaccagctatcatccatgcggacttcgtcaatgccgttaatctgcgagatacggtcgcgcagcgtattaagcgaggcggtactctggaagtccagcttggggatcaccactgccaccgccggtagcgggttctcttccagcatgtccagcgcgccgccaaaacccgaccagttgcggaattctcccagcgcgtcctcacgggacaggtagttgaccttctcaacgccctgctcggcctgaagctgtccaacaacccgcgccgccgcgtcatcatccagcgttttttgcagataaacggtgatctgcggcgacggataatactgagtcgccgcctggttgacgttcttatagaccatgtaacagacgctgggcagcgtcagggagatggcgatcaccatcaccgtcagaaacgtcgccagcggtttgcttttcagatcttgcagcgcgccgtgccaggcatagcgcacctgttcattaaagacattcgttttacgtgagttcggtttcggtgtcggcttctggcgtcctggcgcgttgcgcccgccgcctgttccgccgcgagacttacgcagtcgatccagccgtccgccgaactgcctgatttggttaatcgcgtcgcgcctattcattggccaggcctccatgcagatgtccatcgctcaggacgagctgcctataggaacgacgggagataagtccaatatcgtgcgtcgccatcagtaccgtcacccctacgcggttaaactcttcaaacagacgtaaaatcccttccgacaacgcgtcgtccaggttcccggtcggttcatccgccagcaataccgctggcttattgaccaccgcgcgggcgatgcccacgcgctgttgttcgcctccggagagttgaatcgggaagtttctcgctttgtccagtagtccaaccttatccagcgccgccgacacacgacgacggatatcatcgccgctggcgccggcaatgattaacggtatcgccacattgtcatagaccgtgcgatccatcagcagatggtgatcctggaaaatcatcccaatctggcggcgcaaaaacggcacttcgcggtttttcaggcgcgtaatatcatgcccgctgaagaagattttgccggcgctgggccgctcaatcccacagattagcttcagcagggtacttttccccgcgccggagtggccggtcagaaacgccatctcgcctggccgcatatggaatgtcactccctgcagcgcttgtctcccgccgagataggccttgctgacatgttcaaagcgaatcattgttaatcctctcgggcaaaaagtgcctcaataaaatcgtccgccttaaacggacgcaaatcctcgatacgttcgcccacgccaatgtaacggataggaatgccaaactggtcagctaccgagaaaatcaccccgcctttcgccgtaccgtccagcttggtcagggtaataccggttaagcctaccgcttcatggaacagtttggcctggcttaccgcgttctgtccggtgctggcgtcaatggtcagcataacttcatgtggcgcttcttcgtccagctttttcatgacgcgaacgatttttttcagctcttccatcaggtgcgacttgttctgcagacgccctgccgtatcggcaattaacacatccacattacgcgccttcgcggcctggatagcgtcaaaaatcaccgaggcggagtccgcgccggtatgctgggcgataaccggaatgttgttacgctgtccccagacctgtagctgttcgaccgccgccgcgcggaaagtatcccccgccgccagcatcactgatttaccctgctgctcaaactggcgcgccagtttaccgatagtagtggttttacccacgccgttcacgccaaccatcagaataacaaaaggcgttttaccttcaatattaagcggttcgtctaccttcgccagaatctcgcccatctcgtctttcaacagaccatacagcgcctcggcatctttaagctgtttgcggctggcgccttccgtcagattagcgataatcttacgcgtggtttccaccccgacatcagcgatgagcaactgctcttccagctcctcgaacaaatcatcgtcgattttcttgccgcggaacagactgataaatccggaaccgagattttctttggttttcagcagactgcgtttcaggcgggcaaagaaaccttctttagtcggtttttcctgctcctgaacgatcgcttccaccggctcgtcttcttccgccggcggaacaaccatcaccgcctcttccgccgcctgagcggccagcgcctgcgcttccagctcttcgtcggtgaatttcgccgcgttttcgccctcttcttctaccgcggcaatgacctctacggtttccgcttcggcctgccactcttccggcgagatagcctcgtctttgacctcttccggcagcggcaattcctcgcgttccaccgcgatctgcggcgctgccatctcaatggccgccgcgggctccggctctaccggctgcggtttttcgctctcctgaactttctcagtaacgtccaccacctcttccgcaaaggcttcggtttctgctttgctgtgcgcgggcgtttgcgcgtctacgtctgccgccgtttcaacagggggctcaaccggtcgttgttcctcaacaatctgctgttcttcggtctgttcctgcttctgctctttatcaccgaagcccaaccaggaaaagaagccacgttttttctgttttgccatctgcgactacacccctcgcggcgctatatacatggaagctaaaaaaatgatgaaatagtctatcacttaacttaattcacatcaccgcctggaataacttgcaacaggcggttcgagcaagagaaatgaaaaaaccgactcactctggcagcggccaaatccgcattattggcgggcaatggcgtggccgtaaattaccggttccggacagcccgggtctgcgtcccaccaccgatcgcgtgcgcgaaacgttatttaactggctggctccggtaatggtagacgcccattgtctggattgctttgccggcagcggcgcgctgggtctggaagcgctatcacgttatgcggcccaggcaacgttactggaaatggatcgcgccgtatcgcagcagttgcaaaaaaatctggcgacgctgaaagccaacaatgctcgcgtcgtcaataccaatactctgaccttcctcagccagccggggacgccgcatcacgtcgtctttgtcgacccgccgtttcgtaaagggctgctggaagagacgttacaattgctggaaacccagggatggctggccgacgacgcgctaatctacgtagaaagcgaggtggaaaacggtctgccgcccgttccggcgaactgggcattgtatcgagaaaaggtggccggacaggtcgcttatcgtctgtatcagcgcgacgcgcaaggagaaaatgatgttgattaatctgggccgcttattaatgctcttcgtgtgggcatttttgattcttaatctggtgcatcccttcccgcgcccgctcaatatcttcgtcaacgtggcgttggtgttcatggcgctgatgcacggtatgcaactggcgctgctgaaatcaacgataccgaaagagggtccgcagatgacgacgggagagaaaatccgcattttcctgttcggcgtgtttgagctgctggtctggcagaagaagtttaagaacaaaaaataatgtttgctgccggatgacggtttattcgttatccggggtacggctaacaaacccgacgaaccgcgttcccttatagctcagcgtaccttgatcgcccaccgtcaaagcgtggtactgctgcgcttgtaaacggaacgttttttcgagaccgccattgagcggcttaaaactggcctcatagcgcatactggttcccgccgggctcacttcctgctggcgagagcgtcggtcgttaaccggcttctcccgtttactgctgaccacgaccagcttttgctgtaacggcgccgcctcattagcggctttttcccgccgttgctgaacgaagcggaacgacgcggcaactacgattaatgcgatgattataatgaagaaaagcggtggcttactcatactgttaacctgtcagaaaatgcggaaataagcataccctgcccgttatagtgttgtcatctgaccgtcacggcctctacactgaataatagagccgcaagcataccgtttgcgaaaaaataacgaattcaaggaattaagatgctttggtcgtttatcgctgtctgcctgtccgcatggctgtatgtggacgcctcctatcgcgggccagcctggcaacgctgggtttttaagcccgtcacgttattactattgctgttactggcctggcaagcgccgatgtttgacgccatcagttatcttgtgttggccggactgtgcgcctcgctggtcggcgatgcgttaacgctcttaccgcgtcaacgcctgctgtacgccgtcggggcatttttcttatcgcatctgctctacaccatttactttgccagccaaatgacgttgtcgttcttctggccgctgccgctggcgttactgatagtcggcgcgttgcttatcgccgttatctggacgcgactggaggagctacgctggccggtatgtacttttatcgccatgacgctggtcatggtctggctggcgggcgaactgtggttcttccgcccaacggcgccagccctttcggcctttaccggcgcgacgctgctgttcatcggcaatatcgtctggctgggtagccattaccgccgccgtttccgggcggataacgcgattgccgccgcctgctactttgcaggacacttcctgattgttcgctcgctgtacctgtaaataatagcgcttgactctggagtcgactccagagtgtatcctccggttaatgagaaaattatcatcaaccggaggacgttatgtcgacccctgataccgatggcaaaaaagtcccgccctttacctccttcagattagccccggcaatacagaaggccgatagctgctgctgcgaagaacattgcgcgtccagcgcgcctgtttctactgccgtggcaggcacgcgctatacctggaaaatctccggcatggactgcgccgcctgcgcccgaaaagtggagaatgcggtccgccaaattcgcggcgtcaaccaggcgcaagtgctgttcgccaccgaaaagttagtggtcgatgccgacgccgacctccgcgcgcaaattgaacgcgccgtacagaaggcgggttataccttgcgtagcgaagattcgcgcgacgccgcgcctgaatctcgtcttaaagagaacctgccgcttattacgctgatcattatgatggcgataagctgggggctggagcaatttaaccacccgttcggccaactggcctttatcgtcaccactctggtcggtctgtatcctattgcccgccaggcgctgcggctgatgaaaagcggcagttggttcgctattgaaacgctgatgagcgtcgccgccattggcgcgctgtttataggcgcgacggcggaggcagcaatggtattgctgctgttcctcatcggcgagcgcctggaaggatgggccgccagccgcgcccgtaaaggcgtcagcgcgttaatggcgcttaaaccggaaacggcgacccgtctgcgcgacggcgtacgggaagaggtcgcgattaataccctgcgaccgggcgatattatcgaagtcgccgccggggggcgtttacccgccgacggtaaactggtttccggtttcgccagctttgatgaaagcgcgctcaccggcgagtctatcccggtggagcgcgcaacgggcgacaaagtcccggcaggcgcgaccagcgttgaccgtctcgtcaccctggaggtgttatctgaacctggcgccagcgcgattgaccgtatcctgacgctgattgaagaggcggaagagcgccgtgcgcctattgagcggtttattgaccgtttcagccgcatctatacgccagtcattatggtcatcgcgctgctggtgacgcttattccgccgctgatgttcgatggcggctggcaggagtggatttataaagggctgacgctgctattaatcggttgcccgtgcgcgctggtgatctccacgcccgcggccattacctccgggctggcggcggcggcacggcgcggcgcattgattaaaggcggcgcagcgctggagcaactgggccgtatcacgcaggtcgcctttgataaaaccggtacgttgaccattggtaaaccacgggtgacggcgattcatccggcaagcggtatcagcgaggctgaactgttggcgctggcggcagccgtagaacaaggcgctacgcacccgctggcacaggctattatccgcgaagcgcagacacgcgatctggcgatcccgacggcggaatcgcagcgaacgctggccggcaccggaattgaagcgcaggttaacggcgaacgtattctgatttgcgcggcggggaaacagcctgcggcggcgtttgccgggcaaattagcgaactggaaaacgccgggcagacggtggttctggtgctgcgtaacgagaccgtacttggcgtcctcgccctccaggatacattgcgtgacgatgcgcgcgacgccatccgcgacctgcatcagttaggcgttaacggcgtgattctgaccggcgataacccacgggcggcggcagcgattgccggcgagctggatctggcgtttaaagccgggctactgccggaagacaaggtgcgggcagtcaccgcccttaaccaacaagcgccgctggcgatggtgggcgacggcattaacgatgcgcccgcgatgaaagccgccagtatcggaattgcgatgggcagcggtactgacgtcgcgctggaaacggctgacgccgcccttactcataaccgtctgcgcgggttagcgcagatgattacgctggcgcgcgctacccacgcgaatatccggcagaacatcaccattgcgctggggctgaaagccattttcctggtgacgacgctacttggttttaccgggctatggctggcaatcctggcggatacgggagccacggtattggtgaccgccaacgcgctacgtttgctgcgtaaaaactaatcttctcccgcccggcggcgtcgtgtcgccgggttatcccgcggtattcctttctttgtacatattattcacgcgaaaattatttattttctattacttatcaaaccattaatcagaaatagcgtgatttgatgtaaggttaatttttatccaaccgatattgatcataccgtctacaaaataaggaatgttaggcactatgaaaaatatcaaagtcatcaccggcgttatcgcgacgctgggcatatttagcgccttattgctggtgacaggaatactgttttattccgccgtcagcagcgatcggctgaatttccagaatgcgagcgcactgagttaccaacaacaggaactgggcggcagttttcagacattgatcgaaacccgcgttaccattaaccgcgtggcgatacgcatgttaaaaaatcagcgcgatcccgcctcgctggacgccatgaacacgctgttaaccaatgctggcgcgtcgctcaacgaagcggaaaaacatttcaacaactacgtgaactccgaagcgatcgcgggcaaagatccggcgttggatgcccaggccgaagccagctttaagcagatgtatgacgttttgcagcagtctatccactatcttaaagccgataattacgccgcctatggcaaccttgacgcgcaaaaagcgcaggatgacatggagcaggtatatgaccagtggctctctcaaaatgcgcaattaataaaattagccagcgatcagaatcagagcagctttacccagatgcaatggacgctggggataattctacttatcgtactcatcgtgctggcgtttatctggctggggctgcaacgcgttctactccgcccgctgcaacggattatggcgcacattcaaacgatcgccgacggcgatcttacccatgagatagaggccgaaggacgcagtgaaatgggccaactggccgccggtcttaaaacgatgcagcagtcgttaatccgtaccgtcagcgcggtgcgcgataacgcggactctatctatactggcgcaggcgaaatttccgccggcagcagcgacctctcttcccgtaccgaacaacaggcctcggcgctggaggagaccgccgccagcatggaacagttaaccgccacggtacggcaaaacaccgataacgcacgccaggcgacgggtctggcgaaaaccgcatcagaaaccgcgcgtaaaggaggacgcgtggtggataacgtagtgaacaccatgaacgatatcgccgaaagctcggaaaaaatcgtggacatcaccagcgtgattgacggtatcgccttccagactaatatcctggcgctgaacgccgcggtagaagccgcccgcgccggcgaacaggggcgaggattcgcggtcgtggccggagaggtacgcacgttggccagccgtagcgcgcaggccgccaaagagatcaaagtactgattgaaaactccgtgtcgcgcattgataccggctctacgcaggtacgcgaagcgggagaaaccatgaaagagatcgttaacgccgtgacccgcgtgaccgatattatgggcgaaatcgcctctgcctccgatgagcaaagcaaaggcattgagcaggtggcgcaggcggtatcggaaatggacagcgtgacgcagcaaaacgcctcgctggtagaggaatccgcagcagcagcggcggcgctggaagatcaggctaacgaacttcgtcaggcggtcgccgcgttccgcatccagaaacaacctcgtcgggaggcgtcgccgacgccgttaagcaaaggcttaacgccacagcccgccgcagaacaggcgaactgggaaagcttctaatcagaatgctatctgccgtgcggttaatgcgctttacgcaataaatagcggtacggcagaccctccgtctcttgcgccagcaaatcgtgttccataaaggtacagaaccccggaatatcacgcgtcgtcgccggatcgtcggcgataatcagcaatgtttcgccagtttgcatgttgcgcaccgttttgcgcaccatcattactggttcagggcaacgcagccccagggcgtcaagcgtatggtcaggggaggaaaacagatcgctcatcttcgtctcaatggtagaaaaacggcgatattttacgcccatcttcgtcagtaagccaggcaggttaacgattgcgtgaaaattagccattgcaatgccagcgcaaaacagtattatgcggcggttctttattgggttccctcaccccatccaacaaaaaggtcacaatatgactccgtttacacaatcacagcgcgtaaaagcgttgttctggctatcgctattccatttactggtgatcatttccagtaactatctggtgcagctccccatcactatttttggtttccacacgacctggggcgcgtttagttttccttttatttttcttgccaccgatcttaccgtgcgtatttttggcgcaccgctggcgcgccgcattatcttcgccgtcatgatccctgcgctgctggtgtcgtatgtggtgtcatcgctgttctatatgggcgcctggcaaggtttcgccgcgttggcgaactttaatctgtttgtcgcccgtatcgccgccgccagctttatggcctacgcgctgggacagatccttgatgtccatgtgtttaaccgcctgcgccaaaatcgtcgctggtggctggcgccgaccgcttcaacgctgtttggcaatatcagcgatacccttgcctttttcttcattgcgttctggcgaagccccgatgcctttatggccgaacactggatggaaattgcgctggtggattattgctttaaggtgctcatcagcattattttcttcctgccgatgtacggcgttctactgaatatgttgctgaaaaagctggcagataaatctgaaatttccccattaccggcaagttaaaggttcgttttccgagttgtgataagatgagcgaatgagccgttatggccgtttatcgaaaggaagaagtcaatgcgcaatttggttaaatatgccggtattggcctgctggttatggggcttgcggcctgtgataacaacgatacaaaagcgtcggcagaaagcgccgccgcagaaagccaggcctccggccagcccatcagcctgatggatggcaaactcagtttctcgctgccggcggatatgaccgatcaaagcggtaagctgggcacccaggcgaataatatgcacgtttattctgacccgacgggccagaaagcggtgattgttatcgtcggcgataataccgatgaagcgttgccggtgctggcaaaccgcctgcttgagcaacagcgtagccgcgacccgcagcttcaggtggtcaccaataagtctattgagctcaaaggccatacgttgcaacaactggacagcattatctccgcgaagggccagacggcgtattcttccatcgtgctgggcaaagtggataaccaattgctgacgattcaggtcacgctgcctgcggacaatcagcaaaaagcgcaaaccacggctgaaaacatcatcaatacgttggttattaagtaacctttacgacgatgatgcggcctccggcagtgcagacggaggccgtttttttaagcgccaggtcagcaatagcgccatcgctaccagcccggccgccgccagataaatcaccggcacgcccgcccaggtcatcaccagccccgccagcggcccggtaacccccaaagacatatccataaagacggtataggtcgccagcgccgcgccctggttctgcggcggcacggctttgacggccaccacgcccagcgccggaaagaccagcgaaaaccccatccccgtgagtaaaacgccgatttttgccatccacggcatggctgccgtccccaccagtaacagaccaataatctccacgccaaagcagatcatggcgacattcaacccgcctaaacgattgatgccgttagggaacagcaaacgcgtgccgacaaacgcgacgctaaataacgtaagcgcaaaggcggcgccatcccaacctttagcatcataaaataaggtaataaacgtcgcgatgacgccaaaccctgccgaggccagcgccaacgccataccatacagccagacacgccccagcaccgcgcgaaacggcagcggcttgcctttgttcgccttcaccgacggacgtggaagggctaacagtaccgccaacagcgccacgcccatcaccgttagcgccagtccctgtaacccgccccaggcataacacagcacgcccagcggcgcgcccatcgccattgcgccgtaggtgacgataccgttccaggagatgacccgaccaatatgcaacgacccgacgacgccgacgccccatagtgtcgaaccggtgccggcaaaactttgcccaatccccaaaatcacgcgacccagccccagtagcaacaaactgatcatcggccaggcgctggcgatatccgccagcaggtagccgagtccgcttaaaaaacagccgcataagccaaagacaacgatttttttcggccctaatacatccgcataccgcccggcatggggacggcttaacagagtggcgaagtattgcaggctgataataagccccgcccagaacgcgctgaatcccatcgcatcatgcacatagccgggcaagacggcgagcggcaggccgatggtcaggtagctggcaaagttaaacatcacaatggagacaatacgcagattgaggcgcaatccgtttagcgccggttcagcgacgggttcgggcatgagtatcaccgcatttttacaacatgttttcttttctatcatggcgcgcggtgaaaatcagtagtgagattcagattatcggtatcagggcagccgctacacttagaaaaaaacacaacaaggaaaacttcatggcaaccgctcaacccgacaaaacgggtatgcatattctgctgaaactggcctccctggttattattctcgccgggattcatgccgcggcgggtattattgtacaactcttgctggcgctctttttcgccatcgttcttaacccattagtgacctggtttattcgtcggggcgtgaagcgaccgctggcgattactatcgtggtggttgtcatgctgatcgtgcttaccgcgctggtgggtgtgcttgccgcatcgcttaatgaatttatcgctatgctgcctaaatacagcaaggagctgacgcgtaaggtcttacaccttcaggagttaatgcccttcctgaatttacatatgtcgccggaacgtatgctccgcgggatggattccgataaaatcatgctcttcaccacaacattaatgaccggcgtatcgggcgcgatggcaagcattgtgctgctggtaatgaccgtggtttttatgctgtttgaggtgcgtcacgtgccttataaattacgtttcgcgctaaacaatccacaaattcatattgccggcctgcaccgcgccctgaaaggcgtctcgcattatctggcgctgaaaacgctgctcagtctatggacgggcgcgattatctggctggggctggcgttaatggatattcagtttgcgctaatgtggggcgtactggcctttttgctcaattacgttcctaatatcggctcggtgatttccgccgttccccccatgattcaggcgctgttatttaacggtttttacgagtgcgtactggtcggcgcgctctttttgctggtccatatggtgattggcaacattatggagccacgcatgatgggccatcgtctgggaatgtccacgctggtggtatttctttcgttattggtctggggatggctattaggcccggtcgggatgctcttgtccgttcctttgaccagcgtctgcaaaatatggatggaaaccactaaaggcggcagcaaactggcgatcttactggggccaggccgaccgaaaagccgtttaccgggatgaggcgacagatgctacaatctcctcttcttcataggcaacgttggtcctgatatgtaccagatcgttctgggaaaagtatcaacattaagcgcaggtcaattgcccgacgcgttaatcgctcaggcgccgcagggcgttcgccgggcaagctggctggccgggcgcgtgctgctttcccgtgcgctctcgccgctaccggagatggtgtatggcgaacagggtaaaccggctttttccgccggaacgccgctgtggtttaacctcagccatagcggcgacactattgctctgttgcttagcgacgaaggtgaagtcggctgcgatattgaagtgatccgcccgcgcgataactggcgttcgctggcaaatgcggtattcagcctcggcgaacatgctgaaatggaagcggaacgtccggagcaacaactggcggcattctggcgtatctggacgcgtaaagaagccatcgtaaaacaacgcggcggcagcgcctggcaaatcgtcagcgtggacagcacgttgccctctgccttgtcggtcagccagtgtcagctcgatacgctcagtctggcagtctgtacccccacaccgtttacgctgacgccgcagacgataacgaaagcgctatgacacattaatttttccctctggcggcggacgtgtgttacaaaatgcggagcttcccatgcgccgacgcgccataccaaaaggtttaagtcagatgcaacgtgtcaccatcaccctcgatgacgatttactggaaacgctggacagcctgagccagcgacgcggctataacaatcgctccgaagcgatccgtgatattctgcgcggcgctctggcgcaggaggccactcaggaacacggcacacagggtttcgcggtactttcatatgtttatgaacatgagaaacgggatttagccagccgcatcgtctccacccagcatcatcatcatgatttatccgtcgccacgctgcacgtccatatcaaccacgatgactgtctggagatcgccgttctgaagggcgatatgggcgacgtacagcattttgccgatgatgttatcgcccagcgcggcgtgcgccacggccacttgcagtgtttgccgaaagaagactaacgccgggggcgcttcgcttgcccggcctacgttcgcacgtcgtcgtttgtaggccggatgaggcgcagccgccatccggcaataatgtttacgccattgtgccaatcgtttttctgaagcgtaacagcgctatcaggaagaacacgccgcctatcgccagcagggtcaggaactgcggccagacgatactcaaacctgcgccgcgataaagaatagcctgggcaaggctgacaaaatgcgtcgtcggcatggtcagcataatatcctgcaccgcctgcggcatactttcgcgcggcgtggaaccgccggaaagcatttgtagcggtaacagtaccagaatcattaataaccccagttgcggcatcgaacgggcgatggtgcccataaagatcccaattgaagtggtggcgaacaggctcagcgccacgcccaacataaacaatgggatcgatccttcaatcggcacgccaagcacgcctttcaccatcagcatcaaagacaaaccggaaaccaccagcacgaccagccccatcgaccacactttcgccatcatgatctcaaagggcgtgaccggcatcaccaacagatgctctaccgtgccgtgttctcgctcgcggatcagcgccgatccggtcagcactatcgccagcatggtaatgttgttgataatcgccatcacgccgccaaaccacgccgggtccagattcgggttaaagcgcatccgaatctccagcgacaccggctgaacgttatctccccgcgcgcgcgccacaaagctgttgacctcgccgctaataatattctggatataactgttgccggtaaacgcctggctcatgcgcgtcgcatcgacgttaacctgaatatcaggctgacgtccggccagcacatcacgctggaaattcggcggaatattgaccgcaaaggtatagcgtccggcatccagtccggcatccatttccgttgccgtaatcatctccggcggcagaaaccacgggcggtaaaaactattcacaatacggttcgacaactgtgactgatccatatcggcgatggcgataggggcaagatgcaacgaaccgggcaggacggtagcggaggagtaaaccgaaatcgtaaaggcgaagacgatcagcgacagcatcgctttgtcgcccagcagactgcgcagttctttaacgccgagattataaatattacgtaatccgcgcattacccctcctgttttttcagcagcagaatgctcagacccatcaccaccgggacggcaatcagtaacggcataaataacggccagagatcggacagatccaacgctttggaaaacgtcccgcgcgcgatcgtcagaaaatggctggtcgggtagatctcgccgatccatcttcccggtccttccagcgaagccaccggatcgatcatgccggaaaattgtgttgccggaatgagggtaataatcgacgtcccaaaaatagcggcgatttggctcttcataaacgtggagatcagcagccccagaccggtggcgatgatgacgtaaagtagcgccgcgagggtaagcgtgagaaagctgcctttcagcggcacgccgaacacaaagaccgacagcgcgcacagtagcaagaagttcagcatacccagcgcgatatacggcagttgtttacccagcaaaaattcgctgcgcgtcgtcggcgttacgtacagattaattatcgaccccagctctttctcccgcaccacgctcagggcgctaagcattgacgggatcatcatgagcagcagcggaatgaccgccggaacgatagcgggcagacttttcacatccgggttatagcgatagcgcgtttcaatgttgagcagcccggtctgtttaaccgggttcggctgacgacttgccgcctcctgcagccagctttggtgcatcgcctgaacgtaccccttcaccgtctcggcgcggctgggcatggcgccatccacccagacgccaatctgcgctggcgtaccgcgagcaatatcgcggccaaaattaggcgggatctcaatggcaaccgccaactctcccgaacgcatccgccggtcaagctcgtcatagctggcgagcggcggctgttcgataaaatagcgcgatcccgccagattgagcgaccatgcctggctgctgacggtttgatcgcgatcgagtacggcaaaacgcaggttctccacgtccatactgatgccatagcccataatcagcatcagaattaccgttcccagcagcgccagcgtcgagcgtaccggatcgcggcgtagctccagcgcttcgcggcgactgtagctgaacaaacgccggaagctcaatccctgccgcgacggtttacctgacgcggcgggcgtctgggatggcggtattggggtttcaggcgccgctcccgcagcttcctgtagccaggaaataaacgccgcttccagattggccgcgccccgctgttgcaccaattcctgcggcgtaccgctggcgagcactttaccggcgtgcatcaatgacattcggtcgcaacgttccgcttcgttcataaaatgggtcgagataaaaatcgtcaccttatcctgacgcgaaagatcgaccataagctgccagaacatatccctggcgaccggatcaacgccggacgttggctcatcaagaatcagcatttccgggcgatggatcaccgctaccgccagcgataaacgctggcggataccgagcggcaatgaagcagggagcgtatcttccacctccgttagcataaagcgttcgatcatctgcgcgacgcgcgccgggatctccgctggcggaatatgaaacaggcgggcatgaagttccagattctgccgcacggtgagttcgttatagagcgaaaaagcctgcgacatatacccgacccggcgacgggtatcgatgtcgttcgggtccaccggctggccaaatagccaggcctgaccttcgctggcgggaagcagaccggtcagcattttcatggtggtcgatttgccgcaaccgtttgaaccgaggaagccaaaaatctcgccgcgcggaatgcggaaattaacatggtcaaccgcgacgaacttaccgaagcgcatggtcagatctttcgcctcaatggcaatctcttcctgctcagcgtgatacggcgggatcaccactggcttatgcgcctggcgctgcgcttctggcaacagggcgataaacgcctgttccagcgtcgcgctatgggtttttgcccgcagttgctgcgcgctgccggttgccagtatctcgcccgcattcatcgccaccagccagtcaaaacgctccgcctcttccatataggccgttgcgaccaacacgctcatattggtctggcgctggcggatactgtcgattaagtcccagaactgagcgcgggagagcgggtccacgccggtggtaggctcatcaagaatcagcaattccgggtcatgaatcagcgcacagcacagccccagcttttgtttcatcccaccggacagcttcccggcaggacggtcacgaaacggtgccaggcccgtgctgttcagcagctcggtaatacgcgcttcacgttcagctttgtcatgaccaaagagacgagcaaaaaaatcgacgttctcataaaccgataacgtgtgataaaggtttttccccagcccctgcggcatccaggcgatgcgcggacagacgtcgcggcgatgtttcgcatcgcgcatatccccgcccaggacgataacgttcccttgctcaatcacccgcgcgccagaaatcagcgacagcaggctcgacttacccaccccgtccggaccaatcagcccgaccatactacgggcgggaatgtccagcgtgatattgttcagcgcggctgtttttccgtaatgctggctcaccccctcaagctgcgccacgggaggaacaggcaccagcttcagcgacgtcattgcgacagcctcacgcttagagcgtcaggccagggcacgcgctcatccagacgaacccaggccattcccggcaaaccggttttgacatattccagatgctgtcgcagtagctctggcggaatacgcgctttgacgcggaacatcagcttcagtcgttcatcgtgggtttccacggttttgggcgtgaactgcgccacgctggcgacaaaactgatcgtcgccggaatacgcagatccggcgcggcgtccagcaccagtcgcgcttcgccgccgatcttcaacaaccccgcctgttcggtcggcaggaaaaatgtcatataaacatcgctgagatcgaccatgttcaacacccggccgccagccgataacacttcgcccggctccgcaacgcggtactgcacgcgtccatcgcgcggcgcttttaattcgctgtcgtcgatgtcggcgacaatacgccgctcggtcgcctgcgccgcttccacgcgcgtttgcgcctggataatactggtacgcgccgcttcaatcgccgcttttgccgcagatacctgcgctttggcggtctccagggcggcgcgcgcgctttccgccgccgcgcgatcgtcatctaactgttgtacagataccgcgccacgctgcgacagcgaacgagaacgcacgtgacgtttagagacggagtccagctcagcttcccgctgtttgacgaccgactgcgcggcgcgcatttcactctggcgttgctccagcaaagcacgggcggcggcaaccgcgctctcggcctctttaatctgcgcaatcgcctccagccgctgctcctgcagcacgcgggtatccattttcgccagcacctcgccctgacgaacgaactgcccttccgaaacgaggatggtatcaatacgcccggcaatcttagtggcaatatccacttcggtggcttcaattctgccgttgctggcggcaaatccctccggtattcccgcagggcgcagcatccaccaggctatcgcggccaccgctacaagaatccccgctccccaccacaccagatgacgcttcattttgtccataatcgacccgccgtaatccctgttgtctaaccatgcgtgtcacaaaatccgccgggcgtgcgctcagcgggggtttccattcgggataagaatgaaaaaagaaaaggggccagacgacgaacagacgccgatgaagcgctcgccgtcaaagggagtgaatgatgtaggtacccggaaaagagggagtaatgttgtcatcatcagcgttcctggccgtaaatgaaacacgcatactcataactgctataaatcgatactaacacctctgtccgggatgtctattcgcttattgtttgtaatggtacttagcgttttgccgccaaatcctgcgcgcaggcccaggcgctcgaccacgcccactggaagttatagccgcccaaccagccggtgacgtccatcacttcgccgataaaatagagacccggcacgcggcgcgcttccatagtccgcgatgatagttcgtttgtatccacgccgcccagcgtcacttccgctgtccgatagccttcggtgccgttaggctgcacttgccaggccgtaagcgtgtcaaccaacgcctgctggtcacgaacgttcaactgtctgagcgatacatccgggatctgccccaactgttgtaaacactccaccaaccgtttcggcaaatgcatcgccagcgtgttcttcagactctggttcgggtgcgcgttacgctgttcattgagaacatcttccagcgagaggtccggcaataagttaatgctcactaactcgcccggttgccagtagctggaaatctgtaaaacggcggggccggacagcccacgatgggtaaaaagtaggttttcccgaaataccgtgccattgcgggcggtaatcacgcagggcacagagacgccagacagcgtctggagctgttctaacagcggcttatgtagcgtaaagggcaccagcccggcgcgcgtcggcaacaccttgagaccaaactgttcggcgattttatagccaaacggtgatgcgccaagccccggcatcgacaggccgccgctggcaatcaccaacttttgcgtagtcaccgtctcgccgttcaacgccagtatgaaacccgactcatcacgctcgacgctcaatacctcgctacgcaggcgcatcgttacgccgcctttgtcgcactcggcaaccagcatatcgacaatgcgttgggcggaatcatcgcaaaaaagctgtcccagcgttttctcataccaggctatcccatacctgccgaccagatcgataaagtcccactgggtatagcgggctaatgctgatttgcaaaaatgggggttctggctcaaatacgcagcaggctcaacataaagattagtaaagttgcagcgtccaccaccggacatgaggattttacgtcctggcttcttgccattatcgatgagcagcacgcggctacccgcctgtcctgcctgcgcggcgcaaaacatgcccgctgcgccagcgcctataataacggcatcaaacctttccacgtcgccttcctctctcaaattcgggcgggaattgtaaagtttcctcagtggtcgcaccagcgcgaaaagcgcctgaaaatggtatttatctgaaatatataagataattctttagtgatatcaaacaaagcacgaagtacatcaaaaaaagtctatatttcactttgcccgcgccgccaaagtcactgataatgcgccgcgttcatgtcctcaaaatggcgtaacgtcctatgctacatttgtttgctggcctggatttacataccgggcttttattattgcttgctctggcttttgtgctgttctacgaagcgattaacggcttccatgacacagccaatgcagtcgcaaccgtgatttacacccgtgcgatgcgttcgcagctggcggttgtcatggcggcggtgtttaacttttttggcgttttgctggggggtctcagcgtggcgtatgccattgtgcatatgctaccgacggatctcctgctcaacatgggttccgcgcacggcctcgctatggtcttttccatgttgctggcggcgattatctggaacctcggtacctggtatttcgggttgccggcgtccagttcccacacgctgattggcgccattatcggcatcggtttaaccaatgcgatgatgaccggcacgtcagtggtggatgcgcttaacatcccgaaagttatcaatattttcggttcactcattatctcccctattgtcggtctggtattcgccggcggtctgattttcttgctgcgccgctactggagcggtactaagaaacgcgcccgtatccacctgacgccagccgaacgtgaaaagaaagacggcaagaaaaagccgccgttctggacgcgtatcgcgctaatcctctcagctatcggcgtggcgttttcgcatggcgcgaacgatggtcagaaaggcattggcctggtcatgctggtgctgattggcgtcgcgcctgcgggtttcgtggtcaatatgaatgcctccagctacgaaatcacccgtacgcgcgatgctatcaacaatgtcgaaacgtactttgagcagcgtcctgacctgctgaaagccgtcaccggcgttgaccaactgattccgtctccggaaccgggcgcgactgaaccgactgaattccactgccatccggctaacaccattaacgcgcttaaccgtgcgaaagggatgctggcaaacgtggaaagctacgacaagttaagcgttgaacagcgtagtcagttgcgtcgcattatgctgtgcatttccgacacgaccgacaaagtcgtgaaattgcctggcgtaagcagcgatgaccagcgcctgctgaaaaagctgaagaccgatatgttaagcaccattgagtatgcgccggtgtggatcattatggcagtggcgttggcgctgggtattggtacgatgatcggctggcgtcgcgtggcgaccactatcggcgagaaaattggtaaaaaaggcatgacgtatgcgcagggaatgtcggcgcagatgacggcggcagtctctatcggtcttgccagctacaccggtatgccagtttctaccactcacgtactctcctcttcagtggcgggaaccatggtcgttgatggcggcgggttgcagcgtaaaaccgtgaccagcattctgatggcctgggtatttacgttaccggcggcgattattctttccggcgtgctgtactggctttccctgaagattatttaagccaaatgggccagaggacgctgtcgctaatccggcctgtcaggatgaaacgacacaggcctgacaggccgctacaagcggcgtcatccgggaggcttatctaacacaagcgggtcaggaaactggcccgcttttttcattcagtgccaaatcatgagcgcaatcaagctcaccaccaccaaaccgcataacgcgctggtcagcagaaactggcggcgcacgcgttcacaacggcgaataaattcttcatcatgatgatcgcgatagcgctgagcgtagatataccataccaggcgcacctgtttgttgggctgaccatgcgtggtaaagaagccgccgccatcgacatattgatagagcaaaggatcgcaaccacgaagtaccactaacagtgcgcgtagcgatgagaaatagcgcgccatattaacaatgcaaacgacacataaagcccagaatagtgagacggtgcttatcatatctcctccccggcgacccgcccacggagttcctctccgggactaccgctccccgataccctgccagacaatcagtgaaagagtactacgaaagccgtccatattagcgctccgcattcgaacggctcttatacacattgtaggagatcagttaatttttttaccagaaggttaatcactatcaatgcaattccctgaaaattttgtttaactaactggcaagcaaggcagattgacggattatcctggtcgctataatgtaaggatagttatggtaaacggctgagctagccccgcgcatagagttcgcaggacgcgggtgacgcggcggcataagaaacgccagtagctcaatggtcatcgacaacttatggaaggagtaacactatggcttataaacacattcttatcgcagttgatctctccccggaaagtaaagttctggttgaaaaagcggtctctatggcgcgcccctacaacgcgaaaatctccctcatccacgttgatgtgaactattctgacctgtacaccggtctgattgacgtcaatctgggcgatatgcagaaacgtatctccgaagaaacccaccacgcgctgaccgagctgtctaccaacgctggctaccctatcactgaaaccctgagcggtagcggcgatttgggccaggtgctggttgatgccatcaagaaatacgatatggatctggtcgtttgcggtcatcaccaggacttctggagcaaactgatgtcttctgcgcgccagctgatcaacaccgttcacgttgacatgctgattgtgccgctgcgcgacgaagaagagtaatacttgccgtgccggctggcggctaagaccgcgtctggtctatagtcaatcaggttggcctgaaccatctggcaaattctggttatcaacaacaacgcccgcttctgtgggcgttttgtttatccccccttcttcgcagtactcagtacatcattccatcacaccaaacataattagtgtgatccactaattagtttgcgtatcatttgtataataacctattgatcaggctaataaccgcagtctatatcagggtaagtcttttcggcgcgttttgatatacgcgctcatacgtttcgggatggcattaaaaggcgaaggaatatgaatacaactgcacctacgggcttgctgcagcaacctcgtccatttttcatgatcttttttgtagaattatgggaacgatttggctattacggcgtccagggcatcctggcggtctttttcgttaaacaattgggtttttctcaggaacaggcctttattacctttggcgcttttgcggcgctggtttatggcctgatctccatcggcggctatgttggcgaccatctgttagggactaaacgcaccctggtcctgggcgcgattgtgctggcgattggctattttatgaccggcatgtcgttattaaatcccgatctgatttttatcgcactgggtacgattgccgtgggcaacgggttatttaaagccaatcccgccagcctgctctctaaatgctatcagcctaaagatccccggctggatggcgctttcaccctgttttatatgtcgattaacatcggttctttgttatcgctatcgctggcgccggtgattgccgataaatttggctatgcggtgacctataatctgtgcggcgctggtttaattgttgcgcttctggtgtacttcgcctgccgtggcatggtgaaaaatatcggttctgaaccggatcataaaccgctacgttttcgcaatttgctgctggtactactcggcaccgtcgtcatgattttcctctgcgcctggctgatgcacaacgttaagattgccaatctggtgctcatcgtcctttctatcgtcgtcactattttcttctttcgcgaagcgtttcgtctggataaaaccggccgcaataaaatgttcgtggcgtttattctgatgattgaagccgtgctgttttacattctgtatgcgcagatgcctacctcgctgaacttctttgcgattaataacgtgcatcatgaaattcttggattcgccattaacccggtgagttttcaggcgctgaacccattctgggtggtcgtcgccagtccggtactggcagcgatttacacccgactgggtagcaaaggcaaagatctgactatgccgatgaagtttacgctcggtatgttcctctgcgcgctgggttttctgaccgccgccgccgccgggatgtggtttgccgatgcgcaaggactgacgtcgccgtggtttatcgtgctggtgtatctgttccagagtctgggcgagttgctgattagcgcgctgggactggcaatggtcgccgctctggtgccgcagcatctgatgggctttattctgggaatgtggttcctgacccaggccgccgccttcctgctcggcggttatgtggcgaccttcactgccgtaccggaaaacatcaccgatccgttacagacgctgcccatttataccggcgtctttagcaaaattggtctggtaacactggcggtcaccgtggtgatggccattatggtgccgtggttaaaccggatgattaatacgccaggtaccgaacagtaatactcagtgccggatgcggcttacgccttatccggcctacaaataattgagaatcgtaggcccgataagcgcaacgccatcgggcaatccgttactccgtcagaggggttccggcataaatatcaaaccgatgccctttggtgacgatggcgttgggcgtcgcgacatccgccagcggcggcgcataatcgggacgtttgaccaccacgcgtttggtcgccaactgacgcgccggttccagcagtccgtcggcgtctaaatccggccccaccaacgactgaaacacccgcatctctttcttcaccagcgcgcttttctgccggtgaggaaacatcggatcgaggtagaccacctgcgggcgcggcgtgatatcagtcaacgccgtcaggctggaagcatgaatcaactgcaaacgctcctgaagccagccgccaatgtccgcatcggcgtagccgcgcgtcagaccgtcatcgagcaacgcggcaaccaccgggttacgctccagcatccgcacgcggcagccgacggacgccagcacaaacgcatcgcgtcccagtccggccgtggcatcaaccacgtccggcagataatcgcccttaataccgaccgccttcgccaccgcttcgccgcgcccgccgccgaacttacgccggtgcgccatcgccccgccgacaaaatcgacgaaaatgccgccaagcttcggttcgtcgcgcttgcgcagctccagatgttgcggcgtcaataccagcgccatcgggttgtcttcgtcatgctccagtccccagcgggcagccagaacagataaggcgccgtctgtggcgcccgtttcatccattaagcagatttgcacgtaaaatcagcctttaatcccgtaatgctccagcatcgcgtccagctgtggttcacggccacggaagcgtttaaagagttccatcggctcttcagaaccaccacgagtcaggatgttatcaaggaacgactgaccggtctcacggttgaaaatgccttcctcctcaaagcgggaataagcgtccgccgccagtacgtcggcccacagatagctgtagtagcctgccgcatagccgccagcaaagatatggctgaatgcatgtgggaagcggccccatgtcggtgacggcaccacggcgacctgttttttaatttcaaagagcgtctcaagaattttcgctccttgctgcgggttaaattccgcatgcagacggaaatcaaacagaccgaactccagttgacgcagaataaacagcgccgcctgatagtttttcgccgccagcattttatccagcagttccttcggcagcggttcgccggtctcatagtggccggagataaacgccagcgcttccggctcccagcaccagttttccataaactggcttggcagttcgaccgcgtcccacggcacgccgctgataccggagaccccggcggtctcaatgcgggtcagcatatgatgcaggccatgaccaaactcgtggaacagggtgatcacttcgtcatgggtaaacagagcgggtttaccgttcaccggacggttgaaattacaggtcagataagcgaccggcttttgcaatgtgccgtccgccttacgcatctggccgacacagtcgtccatccacgccccgccgcgtttgtgttcgcgcgcgtacaggtcaaggtagaagctgccgcgcagctcgttattttcgtcatacagttcaaagaaacgcacttccgggtgccagacatcaacgtcagtacgctctttggcagtgatgccgtaaatacgtttcaccacttcaaacaggccattcacggctttgttttccgggaagtacggacgtagctgctcatcgctgatgctgtacaggtgctgtttttgcttttcactgtagtacgcgatatcccacggttgcagttcctcaacgccaaattcggctttggcgaaggcgcgcagctgggccagctctttttccccctgcggacgggcgcgtttcgccagatcggttaagaaatcgagcacctgctgcggattttccgccatcttggtggccagtgactcatgggcataattttcgaagcccagcagttgcgccagttcatggcgcagcgcaagaatttcttccatcaccgggctgttatcccacttaccggcgttcggcccctggtcggaggcgcgagtggaataggcgcgatacatctcttcacgcaacgcctggttgtcgcagtaggtcatcactggcagatagctcgggatatccagagtcagcaggtaaccttcctgctctttggcttccgcctgggctttagctgccgccagagcgctttccggcattcccgccagctcggcttcatcggtgatgagcttcgtccagcccatagtggcatcgagcacattattgctgtactggttgcccagctcagacaggcgagtggcgatttcgccgtaacgctgctgtttctctttcggcaggccgatgccggacagttcaaaatcacgcagcgcgttatcaaccgctttcttctgcgcggtattcagagtggcgtaatgatcgccgtcgcgcaggtcgcggtacgcgttgtacaacccttcatgctggccaacccaggtgctgtattccgacagcagcggcagcgtctgttcgtaggcttcacgcagctccggactatttttcaccgagtttaagtggctaattggcgagaaaatacgccccagaacattgtcggcttccgccaacggctggcagaggttttcccagctatacggcgcgccatgcgccacaacgccttctaccgccgcccggcaatcggccaacgctttggtgaccgcaggcaccacatgctccggtttaattgcagaaaaaggcggcagtgaaaaagacgttagtaatggattggtcatatgcgcagtcctgtagaagaaggtgagtggagcgcgcttttggcgctctcgcgatgagatctagaatgggggatagtaaggggaatttcaatgatggacagcgtacagacgtgggtatcgctgcaataagccgcccctttaacatcatcccggcttacgttttataagccgggtgacaacgtcagcgcgtttttctcgccatctcgtaagcagcggacagatccagacgctgccagaactgttgatcctcggtctcgcccgacaacggatatcctgccggtaacgccgtctcttccattaacgcctgacactgcgctgacgacaggttcggcagcgctgtctgtagcagaacatcggcgccttttggtattttcaacggctgatgctcgcctttctgttgcggcaggttataagtcatggtgaagcggtagaaggtatgcatggccggatcgcggtacggatcgtcttttccggtcgatgccgcgcattcgacaatcgtcgtaccgcactctttcaccagcgcctcacgcagttgagcgcgagcttcgttgaataacgtacggtaatacggatcgttaagataatgcgcgacattacgctgcgcgaccatccgcgcgcccatcacatccagcggatagtgtacgccaaggaccaggcgagaatagccataacgcgcgccacgaatcaccagcgcatcaaagcgttccgggatcatttccgccatcaacagcgcatccgtataaccggtattcgtgtgtccgctggggaaagcaccgccacccgcggtataaggatgaccatcttttaccaccacatcatccggcgtcagatggatagtattacccggcacctggaaaggacgcgggtaatgaaaatattttttcgccgcgccggtgctgacttccgaggctttaatcaacgccgccgctttgcccaactcacctttatcataagcggcgagaaatgcccgccccagccgcggccccattgcgtcgctcaggaaatagagatactccacgctttccgcatccgccagcgcctggtgacgggtattaacatcggcatcgtgattaatcgccgtcaccgtcgccagattgtctttcaatactgcttccggcaatgtattgaaggcggaaagtagggtaattcccatctgttgattctcagtagtatgaaaatcataaccgctagcctgtaaccaggcattatccgcctggatggaattctgtcgcatctgagccatggcgtcgcgagtcaacgcggcggtatcgccttgtaatgccttacgcaactgtgtcagccattgagcctcaaggtcattaaaggcgacgctcgccgagtcgggcgtcacgcttttcgctatcgactccgcctgggacaggggaatatctttcgccagtgccggcatcgccagcgccagagatgacgccagtacagtaatgtgtagtttcattatggttcctttcattaaaaataacgccaggtcaaaaccactaccttgcccacaggcgatgctggcctgcgcagttgacggtttgatgatacgaacacgtcttgcaatactttcacaacgcgcgaaacaacatggcggtactggggtaatctctacggatctgcggtaaactatcggctaacttgtttacttcccggaatatctgcatccatgctcagttatcgtcacagctttcacgctggcaaccacgccgacgtccttaaacataccgttcagagcctgatcatcgagtcgctaaaagagaaagaaaaaccgtttctctatctggacacgcacgcgggcgcggggcgttatcaattgggcagcgaacatgctgaacgtaccggagagtatctggaaggcatcgcccgtatctggcagcaggacgatctgcccgccgaactggaaccgtatattagcgtcgtaaaacatttcaaccgcagcgggcagttacgctactatccgggctccccgttaatcgcccgccagttgctgcgtgagcaggacagtctgcaactcacggaattgcatcccagcgacttcccactgttgcgcgcggagtttcaaaaagacaaccgcgcccgcgtggaacgcgctgacggctatcagcaactgaaagccaaattaccgccggtttcccgccgcggtctgatcctcattgacccgccttatgaaatgaaaaccgactaccaggcggtagtcagcggcatcagcgagggttataaacgtttcgccaccgggacatacgcgctatggtatccggtggtgctccgccagcaaattaagcgcatggttcatgatctggaggccaccggcatccgtaaaatcctgcaaattgagctggcgatccgcccggacagcgatcagcgcgggatgacggcgtccggtatgatcgtggttaacccgccgtggaaactggagcagcagatgaacaacgtgctaccgtggctgcacagcaggttggcgccaaacggtcacggacacacttcggtaagctggatcgtgccggagtaatcacagccatcggtggaacctttcaccttcaggtatacaatcgcgaatattttggcgggtagcgcagaatctatccgtccgacaacgaacataaaggagcggtcatgaccaaacactatgattacatcgctatcggcggcggcagcggcggtatcgcctcgattaaccgcgccgctatgtacggccagaaatgcgcgctcatcgaagccaaagagctgggcggtacctgtgttaacgtgggctgcgtgccgaagaaagtgatgtggcatgccgcgcagattcgtgaagcgattcatctgtatggcccggactacggttttgacaccacgattaatcagttcgactggagcaagctgattgccagccgtaccgcgtatattgaccgcatccatacttcatacgacaacgtgctgggcaaaaataacgtggatgtgattaaaggctttgcccgctttgtcgatgccaaaaccattgaagtgaacggcgaaaccatcaccgccgaccatattttgatcgctaccggcggccgtccgagccatccgagcattccaggcgtggaatacggcattgattccgacggtttctttgcgctgtctgccttgccggagcgcgtcgcggtggtaggcgcaggttatatcgctgttgaactggctggcgttatcaacgcgctaggggcgaaaacgcatctgtttgtccgtaaacatgcgccgctgcgcagttttgacccgatgattagcgaaacgctggttgaggtgatgaacgccgaaggcccgcaactgcatactcacgccgtgccgaaagcggtggtaaaaaacgccgacggcagtctgactctggaactggaagatggccgcagtgaaaccgttgattgcctgatctgggccattggtcgcgaaccgtcgaccgacaatattaatctggcggcagcgggcgtgaaaaccaatgaaaaaggttacatcattgtcgataaattccagaataccaacgttgaaggcatttacgccgttggcgataacaccggcgcagtggagttaacgccagtcgccgtcgccgccggtcgccgtctctccgaacgcctgtttaacaacaagccggacgagcatctggactacagcaacatcccgaccgtggtctttagccatccgcctatcggcaccgtcgggttaagcgagccgcaggcgcgcgagcagtacggcgacgagcaggtaaaagtctataaatcatcgtttaccgctatgtataccgcggtgacgacgcaccgccagccgtgccgtatgaagctggtctgcgtcgggccggaagaaaaaattgtgggtatccacggtatcggcttcggcatggatgaaatgttgcagggcttcgcagtggcgctgaagatgggcgctaccaagaaagacttcgataataccgtcgctattcacccgaccgcatcggaagagtttgtgaccatgcgttaatatcttgtgcgcccatcttcaagggtgggcgcacaagcctgcatgattaatacgtactgaaataactctggatcagttccggattacgcgtctgagttaatgccgtcatcagcaagactcgcgccttcgccgggttgagcgagtcagacaccagccctggctgccctttatccaacggtacgacgccgtttccggtgcgggaagcgcgcaccacgataatcccggctttctccgcttttttaatccccgcgtcgctgcgtaccgagaccgaacctgcgccggttccggcataaataataccgtccgcgtgatgggcgatcgccgcatcatacatatattccgggtcgtcctgatagccgtaaataatcaccacattgggtaattttttgatattacgtacgtcaaaaacagatcgcagggtatgaattttttccacccgcgtttcgaactgtggcttaccattaacgatgacccccagatagccctcttccggcgctttaaaggtatccagagtcgtggcattggttttcgttacaaagcgcgccgaaccaatacgatcgtttaaaacgaccattacaccgcgtcccttcgcattcgggtcagcagccaccgtgaccgcttccagcaggttcattgcgccatcggcgctgattgccgacgcgggccgcattgcagcggtaaacaccaccggtttgtcgcttttcacggtcaaattaagaaagtaggcggtttcatcgagcgtgtcagtgccatgagtaataaccacaccgtcaacatcgtcccgcgccaataacgcattcaccttctgtgaaagtttcaggatgatatcgctggtcatattttcgctaccaatattcgccacctgctcgccgtcaacgcgagcgatattattcatttccggcacggcatttattaatgtttgcacgccaagttcaccggatttatatccggcggtttgcgtattattggctgccgtcccggcgatggtaccgcctgtcgcgagaataacaatatgcggtagtgacgttgtgctaaatacacagtggctgatgagcagcaacacggtggccatgaaaactctgattttcattttcttcctctgaattaaaaataataagtgacgtgtgctataaaaaatttaataacaatcaggccagaaccatttttcctattaacagcccgacaatgaccgagacaatcacgttaactaatcccggacgcataaaactatggttaagcacatatttgccgatacgcgtcgtaccggtgtcgtcaaacgccagcgccgccagacactgccccgccaccggaataaagaaatagccgttaacggcaggccaggagccgattaacgcataagcgggcacccctaacgccagccccagcggcaacagaattaacgtcgttgccgcctggctgctgaccatagcggacacaaaaaacatcataatggcgataagccaggtatgctgttgcaatagagtttgcacttctgccttaatcaacgcgatatgaccattcacgaacgtctcactcatccaggccaggccgaaggcgcagacaatcgccagcgcgcccgcccgaaataccgtaccgctgataatctgatcgacctgcggccgacataacaacacaatcaggcaggcaaaagagagcatcgtaatctggatagcggcggacatcgaaagcggttgtagccctttcgctgtttccaccatgggccgcagcgccggaatcagtcctaacagaacgataacgatcgcgctggtcagaaataacgccaccgacaatttggcgcgcgaagtgactaccgtatttttactttctttctgcgcaggtttaattaacccttcagcaagccgacgttgatattccggatcgtcttttaactcttttcctttattaaaggtcgctattgcccccatcgctacgccgattaacgtggcgggcacgcaaatcatcataatggttgaaatagagacgcccaacggcgccattaaaccaatcatcgccgccatggcggcagatataggactggcggtgatcgcctgctgcgatgcgataacggaaatagataaaggacgttccggtcgaatacctgaatcccgtgcgacttcagaaataaccggtaacaagctataaacgacatgccccgttcctgacataaaagtgaagatataacagataaacggcgctaataacgtaatgtaacgagggtggcgacgcagaattttttccgccagtttgaccagtaaatccagcccgccggaggcctgtaaagaagcggccgccaggacaacagaaagaataatcagaataacatcaatcggtggcgtagaaggcgtcaggccaaaaataaaaaccatcacgccgacgcctaacccgccgaccatccctaaaaatacgccgccgatcctggcgcctatcatcagggccacaaggataaaacataattccgtccaaaacatacttcctcctgggttatctggagtgagtgtcgctttacattgagggacgtaacctattgtgcaaacggtttaccaaaaccaaatgcgccgtaatgagataacacctgcgccgccgatttcccgccctgccgcatggcgcgtagcacgctttctttatcgggttccgccatacccgattgcaaaatggaaagcaaaaaaccggttaagaaggcgtcgcctgcgcccagcgtatcgacaggttcgatataagcaggttgccactccagataatccgcgccggaaaaataataaactttttcatgcccgcaggtggcaataatatgccgacagccataacgataaagtttattgagttttattttgatttcatctggcgataacccgctacaggagataaatccataatctacccacgggcatacctttttaaaatagtcgtctgtaccgcgcccggaaaaatcaaaagagagtaagacggtttgttgtttaattttctccagttccgattccaggtggccgttaatactggaatggactaaggtaaattgtgatatatagcgaagatcgtcgtcagacagactaaaaggatgttcccgcaatacgccgtttttgttgctggcgacaaattgtcgatcaccatgcgagagacggatacaggcatacccattttcgccggtataatggcggctgtgagagatgtctatctgtagctggtgtaatacatcctgtacgtgctgcgcggcgtcgtcattgccaaacgcccccataaacgcgctggggatgtctgctaatttcgcatagacagcaaaatttaatgcattaccgccggggtacatgattccggaatgcaggtatttatcgacaacgttgtcgccaatacccaatacgctgatgctcatcattattccttgtttgtctttacaataaaaagcgtccctgcttttttatccatcctgatgtaattaatattccactttccacatatagcggcgcgtcgttaacggatgctgacgcgcctcagctaacgcccgattgtaaacgggataaacgttattaaagagagagtggttaaagtaatcaataaccgtggttttaatggtcgatagccccagttctttcgcatcgacaacttcaatccggcggccatattttttcaggaagtttaacgcgcgttcatccaccgcccgcgtattgccctcggaaaactggaataagaaaggcgtattcgcatcggtaatttcaaacggcccgtggaaaaactcaccgctatgaatacaggcggaatgtatccattgcatttccataaagatacagatgctctgtaggtaggctgcgccatagcccgcgccactggcgacggtgtaaatgactttatcgtctttatattcctgcgcgaacgcctgcgcacgctccgctacctgctcgcaagcgcgccagacgatacggttgattttgctgacgccatcctgaaaatcgtcgtagtgcgcatacccttccgtctgctggagcagttcgaccgcactcagcaggcctttcatcgttttctctccggcaatatctttaccgtcgccaaacgtgtacgtttccacatagtcgcaatgcgccaccaacggtgaatccattacccaggttaaaccaatgaccggcgcgccgtgctgacgggcgatttcagccgctttaattgtctctggcgtattacctttgtgggaggcgacaaccacaacggcattttctcccagcgctaccggcgggttgttaataaattctccgctgttatacagaccgacagtcaacgctttcgcttctttttctaaaaatgctttcgccggatagaacgccgcataagaaccgccgcacgccacataatagacgtgtttaatgcctcctttctctgcctggctggtcacaatattgctaactgtctctttcatacccatcatgctttcctctggttccatcaatgatacaggcgaggattcgccataaatgactcataatgtattattatttttatatgacatttaaagacatttgatcaagatggaaaccaaaaaaaatcgggatccgcgatctggatcccgattcagcctgctcttcgttagcgtaatgctgacatcatacggtaaaccgtattttatcgccgacaatcaactgttgcgaaacgcaggagagttctcctttgttatcaatcatttcactttttatcaggatcagcggataaccctcgttgacgccaagataatgggcgacttcaaagctggcataaaccagttcgatcatcttacgggagtgggtaaaccataaatggtatttctcgcgtaagcattcatacaaagagtgattattaagatcttcgtccagcaaaaacgcaaaacgtgggggaagatgtacggtttccagcgataccgccacatcgtcggcatagcggatacgttcaatgacgaccgctttttcgccatcgttcatattcagtaacgcttttgtctcatcgtctaccgattcaaaaacggatttgatggtgcgtgaccccgggcgacgtccctgggactggcataactcgctgaaactcatgatgccggtcatgctacgctgaaatttctcaccagagacaaaggtgcctttgccggagacacgggtcagcaaattttcacgcgtcagcgcatccaacgccttacggaccgtgaccctgctcacctgccagcgcgcgctcagttcattttccgtcgggatctgctggcctggtttatactctccacgcgcaatggcctcttttaaggcggcttcaagctgcttataaagcggtttggcgcttttactgtcgggttgctcgatcatttgtatccatttgtattatcatggtgccatagcttgtattataactatttacgttacctttgcttgtgaatccacgccatgcggtgacgtagtgataccgctatgaaacgaatgttctgattttaggtctggggcgggcgtcatgaaaataggattttcgcaatactattcagtaagttatgaagtgtttttcttgagagacaaattgcaaaatgtgatctatcgcacactttgccactcaggtatcgaagcgaatgtctacgcttaatagacagccgggcaacacccgtatcttttacgacgcaagccggaggtccttgtcattatgctcaaccagaaattaaaccccacgccttctgaagatctgactattgatgtcgatctgctttatgaaacagacccgtgcgagttaaagctggatgaaatgatcgaggcggaaccggagccggagatgatcgaggggcttcccgcctctgacgccctgacccctgccgatcggtatctcgaactgttcgagcatgtacagtcaacaaaactgtttccagacagtaaaacgttcccggactgcgcgccgaagatggacccgcttgatatcctgatccgctaccgtaaggtcagacgccaccgtgattttgatttacgccgcttcgtcgagaaccatttctggctaccggaaaccttatccagcgagtatgtctctaaccccgaaaactcgctcaaagaacatattgaccagctttggccgatactgacgcgcgaaccgcaggatcatattccgtggtcttcgctgctggcgctgccgcaatcctatatcgtgccgggaggccgctttagcgaaacctattattgggactcttattttaccatgctgggtctggcggaaagcgggcgcgaagacttacttaaatgtatggcggataatttcgcctggatgattgaaaactatggccatattcccaacggcaaccggacctattatctgagccgctcgcagccgccggttttcgccctgatggttgaactgttcgaagaagatggcgtacgcggcgcgcggcgttatctcgaccatctcaaaatggaatacgccttctggatggacggcgccgaatcgctggcgctcaaccaggcttatcgccacgttgtgcggatgccggacggctccctgctgaaccgctactgggacgatcgcgacacgccgcgcgacgagtcctggctggaagatgtcgaaaccgcaaaacactccggtcgtccgcccaatgaagtctaccgggatttgcgcgccggggcggcgtccggctgggactattcttcacgctggctacgcgatgcgggccggcttgccagcatacgtacgacccagtttatccctatcgatttgaacgcttttctgtataaactggagagcgctatcgccaatatttcagcgctgaaaggcgaacgtgacaccgaggcgctatttcgccagaaagccagcgatcgacgcgccgccgtgaaccattatttgtgggatgatgaaaacggctgttatcgggactatgactggcgacgcgaagaaatggcgctcttttccgccgccagtatcgtgccgctgtatgtcggtatggcgaaccatgagcaggccgaccgcctggcaaatgtggtacgtagccgtctgttaacgcccggcgggattatggcgaccgaatacgaaaccggcgaacagtgggataaaccgaacggctgggcaccgctgcaatggatggcgatccagggcttcaaacggtatggcgacgatatgctgggcgatgaaatcgcccataactggttaaaaacagtgaaccatttttatcaggagcaccacaaactgatcgagaaataccatatttccggcggtacgccccgcgaaggcggcgggggcgagtatccgctacaggatgggttcggctggaccaatggcgtggtgcgccgcctgattggcctttacggagagccttaacctgctccgacctcagtgaatcgcatcataaatggctgactgaattttcagccattttttattgtctgcgctgggccgggcctgagcgcgcagtcgggcctgctccgtatcgtgctgctggcgcgtcacaacagccggaacggtacaaaacgtttgcaaataggttttatgcatcgcggtcagcggcgcgccgctcgacatgtcatgacttaacgttgtgataaatcgtcggcagggtttgacctcatccatcagcgcgggataacgcaacaacagttgcagcacctcggtatgtcctgccgcaaacgcctgctccgtccacgcgagctgccagttcattccgccctggaggaacagcgccgtcacccgcgtatcattgcgctctatcgccgcccgcatggtaaacgcatcccaggtaatccccatatgattgagcgtttcccgcgcggaaggcgcctcgcgcggcggttcatcctgcgccattgcgggagcttgcccgttatcggagcctggcgacgacgaactaaatagccagaacgcgcccgccagtatcgccagcgtcatgacgccaaccgcgccccacaaagcgccggaaataagttgctcacgctcttcaggcgtacgcggaggccgcttacgcggtggttctatgctctcgctaatctcatgcttatctcccccggcctgccgatctttaagccgcgcggtttcccagaactggcgcaattcacgttcatccgccagcagaaacgaagcgggattcacgcgggtacgtttttcggcataggcgcgctggatgggccgaacgatttgctgatactgaacgtttagcagcataagctgcgctgaggtaagcggctgcctggcgataacctcgtttcgcgcgaggcgacaatcatccagaaacatacgcagagtggtgcgcgactcggcgaacagcgttaacgctgaggcgtcattaaaaattctgacgtaatgacgggcaaacaattttttatcaaccaccataagcgccagttcgctgaacaacatgccctccagcgcatgttgatcttctccctgttttaaccactggcgcaaacggtccgggccgaaatgttgcttgaggtagtgattcagggacgcccgatccggccatgcgcgcgcaataagcgcttttaacgtcagttctatcgcccgaagctgacgctgcgcctcaagatgcgcctcctggtcgggttcttccagctcagtttgatacgtcagtagcggctgctgctgacgtagatgttccagcgaggtgacaaaacgcaacgcggcaaggagttgattttcgctcacctcttgcccgctgtcatactggggaacatgctgctgaaggtgacgcagttgcagcataaactggctcaactgcgcgtcatttatccgcaattttttcgccaccgcgccccaaccgcccaggttaagacgcgcctgctcaagttgttccatgaaccaccggggctcttttccctcggtggtatgaatacccagcagcagcaggatttctattgatgcctggcggataatccccaggctatgttcaaaaggcgcgtgtgtcgcctgcgaagcgctattcgtcattatcttccctaaaaagacgatcccgcgacgagatcttcgttttcttttaattatgttttttcatagatataacagatttagccacatttcagtgacttaatcttaatgattgcaaatttataagaagatcggttactaaccaaaaacatcagtttttcattctgtcaacgcggcgtgacgctgaacggcatagaccttttccctgcctgcgtttggccgtctgaccgctagccacgcatgcagcacactttataatcgcgctttttatgagaaagatgccatgccgcacatttcatctcgctttagctccgcctgcatcgcgtttattaaacagtggcagggtctgtcgctggaaaagtatcgcgatcggcagggtaactgggtgattggttacgggcatatgttgacgccggatgagacgctgacgttcattacgcccgaccaggcggaggcattcttgctggatgacctcaatagctgcgatatactgctacagaattgtttgccggaacttaacgatcggtttcaacgcgaaacgcttattgcgctgatgttcagcatcggacatcagcgttttttatcattaatcaatacgggtgatatttcacagccagaaataagcggactgcgaatttaacgtcgttaattcgattcatttaacatcatggcggcctgggtacgattttttacatccagccgccggtaaagcgactccagatgcgctttaaccgtcccggtactaatatttaacgcccgcccaatttgtttatttgattctcctgcggcaagcatctgcaaaatttcccgctggcgggcgcttaacgcttttatatcacgggactccagctccgttgaatttaaccaatcccccggtaaaaacatcatcccgcgagcgacagcattgagcgcaaggacaaaggtttcggcatcagaatcgcgtggcaccacggcctgaacgttaaattgcatgacttcatgcagccacttttgactgccatccatcgccgtgataataatcttcacctccggaaattgctgcacggttctttgtaacacctcgcggcaaaattcagcatccaggccgctatccagcatgaccagcgcatccggcgcgctttctattttttgccagagttcttctgcctgaccgacactctggatacttattcctggaatgtgctgctgcaaactgattttcattccatgaataaatattgactgcctgtcaaacatgattacctgcattacttttctccacctgggtaagataatagtctcaagatgaggaagggtattacccgtagggtaaaataagaagtcgccatttggtataggccattttaccgatagtcattggttgaggaagggaaaggttatgaatatttacagcttcaacatcgggattacagaattcgctaaaattagccttttaaagtaaggaatatcttattagcgcgaacagccaaggctaatttgaatattaatttaatgaagagtacgcctggcgcgtcacaaaggaaatatctgcttttcacctgatgtgttacaaaaaataaagtagcacattttgttaaaaaatagccaatccgcctgaaaaccgcgacgatgggtcaatgacaataccgtatatgtacatgcatttctctctcccactacacccgcggctatcagcgtgttttaccgctctcgtcccgtttatcggctttttggcgctaaaatgcctggccggaaggcgataaatccgccgcgcaacgcgatcagacgtattcgtcacgcgagcaatgattgcgaaagggcttattaggtgctagaaaatcaataaaaccagccgcttcagcgtcactgtttcaataagaacaataatagagcctgatgatggataaaatatatgcaatgaaattgtttgtacgcgtggcggaacgggaaagtttttcccgcgcagcagaggatatcggccttcccaaaggcagcgtctcacggcaaatacaagcgttagaacatcaactgggcatccgcctgctccaccgcaccacccggcgggtacaacttactcaggacggaatggtttactacgaacgggcaaaagatctgttgagtaacctggatgaactggagggtcttttccagcctgatcccgccagtatcagtggcaaaatacgggtagatataccgccatgtctcgcaaacagcctcatcatgccgcgcctgcccacttttttgcatcagtatcccggcattgcgctggaactttgtagtagcgatcgacaggtcgatttactacgggaagatttcgactgcgtggtgcgcacagagccgctacatgcgccagggatactgacgcgcccgcttggcaaactgagaagagtgaactgcgccagcccacaatacctggcgcgctttgggtatccagaaaaccttgacgatctcgcctcacatgcggtggtgcattattcattgaccccgggagtttcttcaccgggttttgcctttgaaactccccacggtatgcagtgggtaaaaaccggcggaatgctaacggtaaacagtacggagacttggcatacagcctgtctggcaggattaggaatcattcagacgccgcgcattgctgtacgggaggcgttacgcgccggaacgctcattgaaattttaccgcaatatcgcgccgctccactgccgatgacgctgcattatccccatcgccgtaatctttcccgccgggtacacctgtttatggtatggctgacggaaagcattaaagaggccgcagagtagccgcattttcagcatccaccggggagaagctatactgacatattctattaatgatgaaggactaccgacctgatgacgcaggaaaatgacgtaaaacgccctattcaggaactggagcacgacccgatacaaaaaatagaaacgcagccgcatgacgccccggaaaaaaacgaaaaggcaaatcaggcgttgcattccgtcaccaccctgatgcaaaaaattcagcgtcaaccaatggtggcccacctcattcgcgcgaccgaacgttttaacgatcgactgggtaatcagtttggcgcggctatcacctacttttcgtttctgtcgatgatcccgataatgatggtgtcctttgccgcggcaggttttatcctcgcctcgcaccctaatctactggaagatattttcagcaagatattgatgaatgtgagcgatcctacgctggcgtccacgcttaaaaatacgattaatacggcggttcaacagcgtaccacggtagggctggtcggactgggtatcgcgctctattccggcgttaactggatgggcaacctgcgggaagcgattcgcgcccagtcacgggacgtctgggagcgcaagccgcaggatcaggagaaaatctggctcaaatatctgcgcgattttatctcgctgattggattattaatcgctttaatcattacgctgtccattacttccatcgccggttccgcccagcagatgatcatctccgccttgtatctcgacagcatcgaatggttaaaaccggcctggcatttgatcggtctggccatctctatttttgccaactatctactttttttctggattttctggcgactgcctcgccatcgtccccgtaaaaaagcgttgattcgcgggacatttatcgccgctatcggttttgaggtgattaaaatcattatgacctatacgctgccgtcactggtgaaatcgccttccggcgcggcgtttggctccgtactcggtctgatggccttcttctacttttttgcccgcctgacgttattctgcgcggcctggatagccaccgccgaatacaaggacgacccgcgaatgccgggtaaaacgcaacgctagtctgcggcttgctgccgaatggcacgcacggcggcgtcattcggcctactgctgtgtggacccaggccgggtatgtaaagcgtacccggcggtacaatcaggcacgtccttccgcctcatctcattgtttcagcatataaatccagtaattaacttttatttaacctgaaaccagttttatccaccaattctaaaattatgtgaagcatttcatagacgcaaaatggcaggcttaaaaattatcccctttttgcgctttttttgaccatctttggcttttgttacacattgaaatataacttttgctgtgcgtaatatggctattcgttcgctaaaaataagaaaatagtatgcaagcaaccgccacaacactcgaccatgaacaggaacatgttccggtaaactcacgcaataaagtcgttattgcctcgcttatcggcaccgcgattgagttcttcgacttctatatttacgccaccgcagcggtgatcgtgttcccccttatcttcttcccccagggcgatcccactgcggcaacgctacaatcgctcgccaccttcgctatcgcgtttgtggcgcgtccgattggctctgcgctattcggccacttcggcgaccgggtaggccgcaaagtcacgctggtggcttcgctgctgacgatggggatctccacggtcattatcggtctgttaccgggctacgcgacgataggtattttcgcgccgctgctgctggcgctggcgcgtttcggtcagggactggggctgggcggcgaatggggcggcgcggcgttattagcgacggagaatgcgccgccgcgcaaacgcgcgctatatggctccttcccgcagttgggcgcgccgatcggcttcttttttgccaatggcaccttcctgttgctctcctggctgctgaccgacgagcagtttatgagctggggctggcgcgtgccgtttatcttctcggcggtgctggtgattatcggcctgtatgtgcgcgtgtcgctgcatgaaacgccggtgtttgcgaaagtcgccgcagcgaaaaagcaggtaaaaataccgctgggcacgttgctgacgaagcatgtccgcgtaaccattctcggcacgtttatcatgctggcgacctacacgctgttctatatcatgaccgtctattccatgacttacagcactgccgccgcgccggtggggcttggcttgccgcgcaatgaaatactgtggatgctgatgatggcggtgattggtttcggcgtgatggtgcccgtcgccggcctgctggcggacgcatttggccgtcggaaaagcatggtcatcattaccacgctcatcattctcttcgcgttgttcgcctttaccccgctgctgggttcaggcaatccagcgctggtattcgtgttcctgttgttaggcctgagcctgatggggctgaccttcggcccaatgggagcgctgctgccggagctatttccgacggaagtgcgctataccggcgcatcgttttcctacaatgtctcatcgattctgggcgcttccgtcgcgccgtatattgccgcatggctgcaaagccactacgggctggcggcggtaggggtttacctggcgtcaatggcggcgctgacgctgattgcactgctgttaacccatgagacgcgtcatcaggcgttgtaatagggcgccggatggcgtcatccggcgcgacgtttcacgttactgcttcatctgcgttaaaatcgtccggcactgattggcttcgccttcagagggcgaaatgagcgccaatagcgcggcggcgggcgttaccaacgtcgccagcgctgccgcaaccgcgccgcgcgcaatcagcgggccgggcttgacgcccgcctgcggatttttaaatgtcccacgcacgtacagcggcgatcgtagcgtaataatacgaatccccttactttccggatcaatggttaaatcgagctgttcagaggcgaagctcgccgtaccggtcacgttaatcaacgcattttctgtatcaaaagcaaaaatttgcggtcgcgccacgccgttcgcaatattgagattcgccgccgcgcagttaacccgcacttcgtcatcgccaaaaatctgcccgacaatatagttgccgacgttcagccccacgatttccatcaggttgcggctaatcaatccatcattcatcaataatttgagattgccgttactgttgccaagcagcgcggcgaccgagttgcccgtcccgcgaatatccgcatcgccgttcagctcgcccagcgttttctgcatcagctccacatccggcatcagttctttaagcttcagccgacgcgcctgtatatccgcccgcccctgcattggctttttatccccttccaaatggatgttggagacaatactgccgcctgccagaccaaacttcagcggctgtagacgtaagtcggcgtttttcaggatgatatgggtcgaaagatcgctaatcggtagactgccgccatgttcaatacgtcggcctttaaaccggacatcggcgtccataacgtcccatttgtcggtttcaaagcgatcgtaaggcaacactttatccgccggctgaacattcttctcgcctttgcgctgttcagaccgtttcgactgctcagcgtctttcccggaatccacgccaatcagcggcccaagatcggccaggcgtaactggcgcgattcgacatcgccttccagtttagggcgcggtttaccggtggtataagtgagggagccgtggatatcactgtcgccaatgcgcccgttaaaaccgcgataatcaaatactgatgacttttcggcgtcaattttcgccaccaatcgcccatcggtctcaaacggcggcgtatccggcagcagcacgccggttaaatcatataaatcgcccagtgaatcgccagagaatttaagccgcagatcgacgccgcccattttcatcggttcgttcaccacgccgctaaaagccacccgcgtattaccagagcggaaatcggcctgcacaggaaaaggcgtactttcgctgcgtagcgccagcataccgcctatttttcccgtaccggtcaacggttccccgttataacgcccctgcgccttcaggccgaagacatagtcgcccacggtggatttgtctgctttgcctttcgttcccgtcacttcgctgaacggcaacggtttgcctaacggatcgaccagaatagtgatatccgctttactgaccttatcatcgatcgcgattcgcccctggtcgaagagaatattatccagccggaaggaccaggcggaaggtttagcattggggtccgtattcttgtcttgcgtgaggttaaaggtccagttattggttttctcggacagacgaataagacgcgcgtcgggtttcaccagtttgatccacggcagccagacggttttggtcaggagcgccagcggggcaagcgtcgcctcaacgcgtggcagatgcaccatcgtaacttccggaatatccggcggattgccgagaatgacgtcttccgcgtgaacatgcggccacggtacccagcttcgccagccggtctcctgtttttggcgttcccacaccacgcctaaatcgccgcgaatagcgaaaggccggttcaattcggtagagactttctggttgatggtcggtttgaggcggttccagtcaaatgttgcgatcaacaaaatcactatggcgatcaacaacaagaaagtccctgtaatggcggcggttattttgcctgctttagtcatgtgttatttcctcacttcttcccttgcctgtcctaaagatagttcagccagacgaaaaaggaggatgaccgcgcctcgtaataccacgtattacgggaacagtctggcgttacagggtcagaatcacctcttcgagcgatatcagcggcacgggtcgagaaagaaaatagccctgggcggcaaaggcgggcgaacgctgcacatcacgccactcttccagcgtctccacgccctcgacaataacgccgcggcagtagcggttcatcagttgcagcagcagagtgaacaggttgcgtccctccgcggactgacgcagcatgacgaacagctcgcgcgccactttaatgtagtcataacgcacttcgctcagcgctgaaaaattggccataccagtaccaaaatcatccagccacagcgggccgaactcacacatcgaggcgaaagaggagtctttcggcaaacgaatatgttccaccaattcgaaacgcagccagggtaaacgctccatcgctgccagaatgtccggctgtcgtcgcatggcaatcagcgtagggccgtcaacattgactgatgccaataagtgatggcgagtgaaaaaatccgctttttgttcaagctgatgaagttgttctttcactacgtcaatgcggtgtcgaaccgctaactccgcgaaataacgatccggggcaatacgtctggaagggttatcaggatgggtgacgacagtgagaagttcaaccgccatcagacggccatccgtctggtatatcggctggtaagtataggcacgctcgcattgcagccaatagcgccgttcctgcaaattctctatacctgcatcaggaacgcgtagctgctggataacctgctttatcatctcagttgtcctgttaatgggagtgtgactgtccggactcgtcaaaggttatcggcgttcaggcagagaactttaccctcggtccctggcaaaataaaaacagcccccgaaacttgtcaaaaatacgcacttgctcaaaaaaataatggaccgatgttttaatattattgaccactaaacatccacagcgcacactaacgctaatttttacagatcaggttcacgactatgtctaaaaagattgccgtgattggcgaatgcatgattgaactgtcgcagaaaggcgctgatgttcagcgcggcttcggcggcgacacgctgaatacctccgtttatattgcccgtcaggtcgattctgccgctctggccgttcactatgtgacggcgctgggtaccgacagtttcagccaacagatgctggaggcgtggcagcatgaaaatgtggatacctcgctaacgcagcggatggaaaatcgcctaccaggcctctattacatcgaaaccgatgacactggcgagcgtaccttctactactggcgtaacgaagcggcagcgaaattctggctggagagcgagcagtcagcggctatctgcaaggcgctggcgaccttcgattatctctacctgagcggcattagcctcgcgattttaagcccgaccagccgtgataagctgctgtctttattgcgtgaatgccgggccaacggcgggaaagtcatttttgataataactatcgcccgcgtttatggacaagtcgcgaagaaacgcagcaggtctatcaaaagatgctggaatgtactgatatcgctttcctgacactggacgatgaagacgcgctatggggtcagcaaccggtggaagaggtcattgcccgcacccatgcggcaggcgtgcaggaagtggtggtaaaacgcggggcggactcttgcctggtctcaattcagggcgaggcgctcattgacgttccggcagtaaaactgccgaaagagaaagtgatagacaccactgccgcaggcgactccttcagcgccggttatctggccgttcgtttgacgggcggcagcgcgacggatgccgcgaagcgcggacacctgacggccagcacggtaattcagtaccgtggggccattattccgcacgacgcgatgccgcagtaagtcatttgctcttgcccggtggcgctgcgcttaccgggccggcaggcggcagcttactgtgccgccggtgtctccgtcacttccggatgcgcctcatctgcttcaacagcggcggcagttgtcgggaccatgatttcatcccacgtcgcctttaacgccttcatattaaattccggctcgccttgcggttgcagcaaaattaatgccatctcctgcgatagctgctgacgtaaattctgattgagcatatcaacggtcaggctgttgaggaaattctgacgcagcttctgatactgctccggcgcgatatccaccacttgattctgcagcgagcgcatacgctgtccagtcaaaatgtcagtatcggtacgcgcgtaggtcgcgaacagcttttgcaattcgagatttttctgcgccaccagcgcagtaaactcctcttccgacaaacctttatcgcgtactttcgccagttcattcgccaccaggctcaaattggtattgagcttatcattaggtgattcaatgttgatggcgcactgcgcgcgcaggaacagaacccggcagtcaaaccccagaccaatatctttcgcgttatttttagtaagctcttgctggatatgccagaacagcgcttcgcgcgccagatccgcctgccagtagcgcaacagcgccgccgattcgcgaatcggttgccacggcgtatcccacataatggagagacgatcctggcgcaccgcatcggtcataatgctcactgattccgcccgcagcggcgaaagcgtcggcaccggggcgggcgtttcgcgtttacctttcagcgtaccgaacgttttgttgatctgctcggcgacggagcgcgcatcaatgttgccgacaacaatcagcgtcatggcatccggggtgtaccatttttcatagaaagcctgaattttggctgcgtctaccggctgctttaacggttccgcgggatcgtgccccaataacgccgaccctttcagccgataacgccaccagccctctttagtatctgctggccacgtcgcaaccatatcttcgctgcttaacgcatgattcaccgtctctggcgtaatggttaatttaccggagacgttagccagataggtcagcgcttctttcagcagatcgttacggttattgggtaaactgaggttatagagcgtggaatcataagaaacaataacgggcggcatgggacgtttcggatcaaacccttgctgccataaagaacgtgcctgtgcggcatccagaccaccgctttgcgtcagcgcgatacggggaatcgcatggctgaacccgctctgttgcgtactttcggtgagcgaaccggtattaacctggagacgaacttcaatacgatcgctggggcgctgaggcgtagccaacacttgccactgtaacccattagccagcgtcccctgttgccatgccggatcgggctggagcgcatctgcctgcacatagccggcagaggccaacatcaacagactgcccgctaagagtcgaatttttgtgccctgcatgtgaacccctgatcaacaatcctggtaataaaaagacagccccggcagggatgcctgaatatgacgtaaaaacacttcgtgttagaccgcgagaacctaaaaatgtcacggaagaagtgaaataatcccgaagcatcatgctgtatgctttgggcgcaggggtcaattatgcgcaaacacccgcagtcctggaagggactacgggcataagtggcgagattaggaggaaatttcgtgcgttttgccatccggcgcacgattattaagcacatcgtccagcttttggtgatctaactctttcacccatttggcaaccaccaccgtcgccacgccgttacccaccaggttagtcagcgcgcgcgcttcggacataaagcggtcgataccaaggattaacgccagtcccgcaaccggtaaatggcccacggcggagatagtggccgccagcacaataaagccgcttccggtcacgcccgcggcgccttttgacgagagcagcagcacgaccagcagcgttatctggtggaagatatccatatggctgttggtcgcctgggcgataaacaccgccgccatcgtcaggtaaatagaggtgccatcaaggttgaacgaataccccgtcgggatcaccagccccaccaccgatttacggcaccccagtttttccatcttatcgagcatacgcggcaacgctgactcggaagaggaggtgccgagcacaatgagtaattcttcccggatatagcgaataaatttaaaaatgctaaagcccgttacccgtgcaatcgtccccagcaccaccaccacgaagagaatacaggtgatatagaagcagataatgagctgccccagttgcaccagagaaccgacgccgtatttaccgatggtgaaggccatcgcgccgaatgcgccaatcggcgccaggcgcatgatcatattgatgatgccgaaaatgacctgcgaaaaactctcaatcacattgaaaatgagctggcctttgctgcccaaacggtgcagcgcaaaaccaaacaacaccgcaaacagtaagacctgcagaatgttgccgctggcaaacgcgccgatcacgctgcccggtatgacatccatcaggaaggcaataatgccctgctccttggcttgtgcggcataaacggccaccgcctgcgcatccagcgttgccggatcgacgttcatcccggcgccaggttgcacaacgttgacgatgataagaccgataatcagcgcaatcgtactgacaatttcaaagtaaagcagcgcgaccgcgccggtacgccccaccgctttcatgctttccatgcctgcgatgcccgtcacgactgtacagaaaatgacaggagcgatgatcatcttaatgagcttaacgaacgcgtcgccaagcggtttcatttgtgcgcccagttcaggatagtaatggccaaggagaataccaatggcgattgctgtcaggacctgaaaataaagacttttgaacagagaggttttcatagggtgtccttgaagtaaaaaccacaggtcttgtaaggttatgagtaacctgcggccttaaaataacacccacacaacatgacagaaatgcgccaggatcataattgaaacaaaaatgttaaaaagtttgagctggctcgcacaagcgcgaccttttttaacttttgtaatcagaattttcgtgcgacagataccgttcttcaaagatatccgcgggaacgggccgagcaaacaggaagccttgcgcgacgttgactcccgcctgttccagccacgcgcgttgcgcctcgttctccacgccctcggcaatcaattgtaaattaagactgcgggccatcagaataatcgccgtcaccatactgtgatcatccggtaacccatcgacaaacattttatcaattttaaggatatcgaccggtagcgacttcatatgctgtaactggcgcagccccgcgtaacccatgccaaaatcatccagtgcgatacgcacgccagcattacgtaacggacgtaagatagcgacggcagcgtgcggatcgtcgatacggcggctttcagtgacctcaagaatcagcgtacccggttgaatacgatagcgatttaacaattccagcagatccgacaccatgccagggtgcatgagctgtaacgcggaaagattgacggagagcggcaatgtcacgccgcgctcctgccaggcggcaagctggcggcaggactcttccagcacccaatggcccaccgtgaccatcaggccgcaggattcaatgcgctcaatcagcccctccggcaattcccagctaccgtccggctgttgcatacgtaacaaggcttcggcgcttaatacgttgccgctgcgcatctcgacctgcggctgcaaccaaatggcaaactgatggttatccagcgcggtaaggatatcgctctcttcggtaaggcgctgttgagcggcctccatctgcgccgggtcaaagaactggatctgatttttaccttttcggcgcgcggtaaacgcggcggaaacggcgcgaccatagagcgcttcggcggtcagatcgccataatacatcgcaatgccaatactgcagcttgggcgcagttgaataccctggatgggcagtcgttcattaatgatagtgagtatttgctgacctaatgtgatggcgtgccacggctctttaacgccgtgggcgataatggcgaagtcatacccgctgacctgcgtaagcaccatgcgcggcgccagcaccgacttcagcttctcaaccagcgtcagtaatagaatctcccgctgcgtttcttgcagcacgcctgccgtgtcacgcaacgtttcgcacgtcacgatgataagcgcggtggtctgttggcgggcgataacctgttccagcaatgccattaaaaaggctttattgggcagctcggaaaccggaaaacgcatcgcgttgtccgtttgctcctcgcgttgacgctgcataagctgctggttgaggttatagctgcgcaccagcattccaatttcatcatcctgatgcagacgcggcaacgccagctgatgtccgatcagctcctgctgcggaatgtcgttcagctcgcgggcgattttgcgcagcggatgcacaatcaggcggtttacgcaccaggcgatggccaccgtcaggatcagcgataaaagtaagtaaatggtcactaacgtagagagcgcgctcatgacgaacttgtacatacggtacgaatccgcctgcaatacaaggtaggccagcggttgcggattggcgggacgctccagcgaataaaccggcaaagaaatttgtaccggcagttcgaagagacgcgtcaccataaccgggacggggcgttcaggaatgaagcgcttacgcaacgcctggaactgattcggcaataccacatcggcgcgactcaccacgcccgcaggtttaatactttccagaatggtttccgcgccggggagatccgcttttaaaatcgcggaagaaagaggttcccgaacagatcgcgcgatgctttccagttgcgtagccgtgttgtagcggttctgctgtaccagatggaacaacaaaacggtgcaaaagacaaaaacaaacaccatgacaacggccgcaaccattgccatctgtttaattgttaacgagcggctgacgcgcaaattgactctccctggatatcccggactgccgcctgagtatacccgattgcagcggcattaagagaggctgtatctgaaaaggacttttctgaataacggttaatgatagcgtctgatggcgctgcgcttctcaggcctacgacgcctgtcaattcgtaggcctgacgcaatgattaccagtcagcgtaaggcaccagaggctgcggcggtaaatccatatccccctgccagcccgccgcggaataacggacatacagcagcagatgactgggggtataatctttcgcctgctgaatatcgacagccgtacccacaaaccagttggcagtgacccggcgttcaatgagcgcccgcgcggtatagccaaatccctggctgctgccgccgccgttggtctggtcacgcgcatcctcctgataatccgccgggatcaaattcatcagcggataacgcggcatggtacggttgcgggagtgcgaccaggataccgagccgcccagctcccacgaccagttttccgtacgctgccgccacatcaccggcaccgcaaacgacaggtattcctgcgggctataataaccgccctgacccagtgaataaccgctcaaatctttgtcgtaatgccagatcatgttattcagcccgacggtaacgcggcggttattctcgttaatcaccttatagtaataaccggtcatccagcgcacgcgccagttatcttccacatttttaccgctcaactggtcgccgctgagcgacgcccagacaccgtttgcttcgcctttatcatagctgagactgacgccgccgccgttggcccgcacgccgccccatttggtgccggtattgctgctggcgtccttttgcccgccaaacgccagcagcgagctggagatcgggcgacgatgcgcgttcagggtataacccaacggcccgatatcgtcgctatagctgacgccgccgaccacatcaacgacattaaagcccatcggcgtcgtgccgatatcccagcgccaggtctcattctgccagccgaccgccacgctcgcgcccgtatcggcctggctacgatgtccgctgcatttctccagcgtacaggtaccccagttattatcgtattttccatccgtatccgtagagaagcggccaacatccatattcaccatatcagtacgaaagaacgcccgtccgtccgaccagggcgcatccacctgaagcatcgtggtatgcgccttcagatcggagtagccgccagtcccgctcgacccccaataatcgtgcgccaacgtgacattgagatcctgctgacggtacaactccgccgcatcgctacgcacgccgcgttttagccagtcatctttttcatcattgcgcgtcaggcgggtaaaggtatcgttatccaggggacgaaccggcgtaatcgccgcggcgaccattgcctctttataggtttccaacgcccgctgcggctcgcccgtttgcgcctgaaaagcggcggcgtcacgcaataccatcgcgctttccattgatggcggctgtgcttttgcctgcggcgtaatgcggttgaaggtccgcgccgccgccgtgatatcgccaagctggagctgcgccagcgcgacgcggcgctgcatgttaatagaggtgatttgcgacgcaggcagcgccgccagctgagcgcgcgccgcagcgttatcgccctgtgcgatgtcgatttccacccgccccagcatggcatcgacattacccggttcccgcgccagaacggcgtcataagcggcgcgggccgccgcattatcgccacgctgctgcgcccagtccgccaacgttaacgcaatgcgcgtagagggcggctgctgacgtaacaacgcttccgcttcgcgttctttgccgctatcgcgcaagcggttagcgctttccagcacctggttactttgcaatcggcccgccagttcctgaatattgctgttccactggctggtcggtagggtattgagatgcgccagcgccgcccggtcccgatcgctgccggaaagataaagcccataagcatagacctgttccggatcgtttggcttctgctgcgccagagagcgcatttgcgcatcggcctgggcgtgctgcccggcctgccacagatcgcgtgacagtcggtacgtcacccacacgctccccggatctaatgccagccggcgacggtgcagttctgcggcctgcgcccatttgccctcgctttccagcgtttccgcctgctgcgccagacggtcattttccagactgcgttcgatatcgtcgatactgcgccgctggctggcggaaagagaagcgataaacgcggcggctttttgcggcgactgctggcgataaagattcgccagcccgcgtacagcattggtattaccgctatccatacgcagcgtctgctgataataacgttcggcggcggcattatctttgcgcgccatcgccacatcccccagccccagtaccgcgtagctgtcggtgttatccaccgctcgcgcctgctgatagaaacgctccgcctgggccagattattcgcttttaaggccgcgtcgccctgctgaattaacagccagtagcgattgaccttcagcaggctctcccacttatcgcggctgctgctgtgcggcgccatcgccagcgctttttcaaactgcgcgacggcgcgggcgcgatcgccacgctgtgagtatgcctgccccagcgcgccgaccgcctcgctgtcgtcctgccgggcgctcaccgcctgctgcaattgcgcaatggccttaccgccttctccggcattaaccgccgcgatgccctgcgagcgcgcgcggaacgccggatcggctaactgtttttgctgctcgctaagctgggcgcgggcggcagacacgctatcgccttcgctaaactgcgtcagatagtcttgcaacgcttttacgctggcgtcgctcaccgggagatcttttatctgctggtaccagatggcggaggccgcgctgcgtcccgtactggatttcgccatctgttttagcaccgcaaatccctcatcgcgccgcccgctggcgaacaacagttgcgccagcgcattttgcagagcgttattacccggactgacggcattgattttctgtagctggttaatcgcttcgtgacggcgggcgggcaatttcgccacggtcgtccagtattcgaccgccagttcgccctccggcggataacctttaaacaacttgtcgtagctggcgatcgcttgttcagtatggccggtcgtcgccagtaaacgcgcctcctgcaaagactgacgtccttgtggcgtggagagcagcatcgcggtgcgggaagattgatacgccgtcgactccggcgccagttgcgccagccggtcaagtagcttctgtgccccgtcgctatccccctggcgcaacagatagcggaaacgggcggcgataacctgtggatcattggggtcgatcagctccaggcgatagagcgactgacggactaagtcctcacggtgcgtggcctcgcccagccgaacctgctccagcaactgttgctgcgcggaggtcgctgcgccggcaagcggtgttagcgccataccaagcgataaacccaacaatgcccgagaaacgccccttttgccaggtaaggcgtttcgaccgccagccggcaaaaaagcgtgcatgagacttaacgtgaacttacgcattcctggccccagtcaggtaataattcacctttgacggtgaagcgaaaacggtgctgatcccagccttgtccaaagagagtcagcacatagttgtaataggcatcgctgccaggaaaatggtctgcgacccgctgtcgctgcacggcctgggcgtcgcgattttgcaggaaaggcagtaaagcggcggaaaacccgaccggccccgtcccctgcgcattcccgctgacgacatccactttctccggtggaacgccgtttttcatcgttaacgtcgccatcggtttaaatcgcgccagtaaacgcgctttttgcggatcgccatcatgcatcattcccgtccataaatagacgcgaatcgcatcgtagctactgatcagcgtcttttccgctttcaactgccagccttgcttgctttcataacgcacccagtccggcgagaaacctttcggcgcggtttccagcaaaagccgcaaattggtttcccgtagcgtcgaccacggcgcgccaaaacggctaaagtattgcgccaactgcggcggcagatagcttgggttaaaacgccagctattcgcctcggcaaagccgattttgccaggtagcagcattgagcccagccccggcacattcacgacctcttcgcgggcgatgcgttttagcaacgccgtgcccacctcggtataacgcgtctctttccacaggcgaccggcctccagcagcgaccatgccatccagatatcgccgtcggacgcggagttgctgtccagcaccgaccaggtgtcgggatctttttgtccccacagccaggcgggcagatgttcacgcagcgatccctgcgccagattgttttgcgtccagttaaacagttgcgcgaacgccggtcgatcgttcgccgccagggcaaagaacatggcgtagctttgcccttcggaggtggtaatttttcgcgcatcgcccggatcgataacgcgtccctgctggctaatgtaatctttcttgaactgttcccacgcaggccagctacaggccgcctgcgcatttattgccgtcagcatgacgatcatcgttatccatccgcgcagcatagtcatcatgcgttactcatggtcagggtcgagacgacggcgactgagaatacgtagcagacgccacaatacccacgccagtaataccacactgagggccgccagtaccgccagcagcaccgggtgattcgccagcgcataccacagccgctcaaaccacggcagatgtccgacgtaatagatatcgccaacgcgcagactgtgaacgccggactcgcggatcaccgccacggaaccaaacatcgcggcgcgtttaccgctgtcgttcacagcgtcgttcagtagctggtaaccgcgcgggctatcagccagcagagcaatcacgctgcgctgatcattaaacggcgactggaagcccaccaccgccgccatcgggccgctggcggtgacggtggactgcgcatccgccgcgcgatcggcctcatccggcataatcgacgggaaagcggtctgccgcatcggggtttttacccagctttgtgtcgcctgcaccaacagatcgatacgcttatcatcttttagcttgcccggaatagcgccaataatcagcagatcggcgtctttgtcggctatctgagcgctatcatcggtgatggtcagattaattgccgggaaaccggtctgcccgccaatggcaccgaccgtattcagcagcgtttccatttgcgcttcggttggggtcttcggcatcaccgccagcgtgtcagacaagtcggccatccggctgaacgggaaacccgcattggcgaacgcgcgtaaatccggcatcgcgataaagtggtaatatttcgaaaaatcgatagtggagtcatcccctatcaccacatgattcggtacaggctggaaggtaatacagttgtccaccgacccgcccggcatcggattcatgtagcggaagtcaaaacgtagttggttcatcgcccccagtttgagcgccggaatagacacatctgttttaccatccagcagtccctgaagtaccggcaagcgcaacaggagtcgattagtttcctgcgtgctgttaaggctaaaggcttgcaggaactggttattcagactgatgtccagtcgtgaactgtctttggtcggcggcgaggtataacggtagttgagatccatatcaataccgttgctacgcagcaaatagaggtccggcggcagattcaaagaaacattgatgggcgccggctccagcccactcgactggagctgctcttcataggttttcagctcgccaaaagtgaccgggcgatcggtacgcacccagttcggcgcatcatacggtttgcgcgccagcagcggttttacatcgttgaccaccacgctggaaccacggaagagaatattcccttgcgcgataccttttgccgcttgcaacaggtctttatcatcacggccaaacacgaccagcaacttcacatacggattatccggatggctcatcatctcgataaccggcgcgttaaccgcaggatgatcgcgcaggaaatcggggcgtcgatcgttggtggcgaacacgatcgcattgcgatccggcaggtgattatacaacaccgggaagcgctgaccgcgccagcccgcccgcgagccaaaccaggacgcgacaatagaagccgcctgctgctgcgccagatccggcatgtcagcaaacactatcggcaacgtcaccggacggttatcccgcggatcgaaaaacggcaccgggaagtgggacagatcgttattcaccgccagcatgttataggtcagatccagggcgctatttcgcccgatgtctaaccacagagtactgctggccggattttcacacacgtcgcgatagtggccgacaaactccagccgcacccggttaaaatcggtgataaatagcggattgataggtacctgcgccagcgtctttttccccaactgctcttttgtcaccggcagtacgcccatcagttcatcattgagataaaccttgagctgcgactgaaccggcaggagcgacggcgagggcgtatattccagattcagcaccgctttcgacgccacttcatcgctgcgcataccaaattcaatgccgccgttagggttaacgccacgcagcgccatactacccggcggcggcgcgatttgcgcaaaggtcagcttgacctcgcgcgaaggcgcggtctgtgccacgacgggcgcctcagttgcgggcgacggcgcaggctcggtgggttcagcatttatcaatggcggcgtagcaggcgccgccgccgtcatgaaagcaggaaacgcgcttaatcctattaccgccgcacacatccaggacaattttcttttcatcgcattatcatcattgttgagcctgagccataacccgatccgacggctgtatcgccgcttgccgctccgggcgacgcggaataaacgatacaatccaggcaattaacgccgtcaacgatcggaaaattacttttactgaaggcggcgcgaattccgcgaggtggcgatatccgcggaagcccagcttcagaatatccagcaagctttccagcggtttatcttccgggaagctatcttgccaaagcgcccacgtatcggcgcgagcgaaggtacactgcacaaaatcaatatgttgtttggtggtgagcggcatcagttgcagcccgacctcattgcccgttacgcgcaccacctgcgttggaaagacatattcctgctgcccgcgtttaagcaacagattcactttctgcccttccagcacctgcgcctgaccgttgatcttgatgcctaacccgccgtcggagaagtcatgtacggtacaggagaacaaatgtccatcttcgcgggcgatggcccccggcatggcaatctcgacccgatgcgcgcgtctgacctgtttactctctaccgaaaccgcaaccgcgccgccgagaatgaccaggttatagaagacccacaccaggctaacgatgacggtcagcgtttcattttccggcccgtaatagtatcgccatacgcccgccgccacgccgagcaggttaagcaagacaaggaagatatacggacgcgagattacccagtcgacgtacttctcttccaccagcccgcctttcgccgtgacgttaaatttccctttgtgcggattgatcaacgcgaccagagtcggcggtgcgatataccatgccagtaccgtttcatagatttcactccagaaagagtgacgatacttgccctgaatcttcgagttagtcaggctggcgtggaccatgtgcggtatcacaaatagcgcaatcatcaacgcaggcgcataaatgatataggcgtgcagcagcagaaaagccagcggcgcggtcagaaagatcaggcgcggaatgccggacaagaaatggaacatcgcgttgaggtagcacagccgctgcgccagttttaagcctttaccaaacagagggttatcgaggcggaaaatttgcaccatgccccgcgcccaacgaatacgctgcccgatatgcgccgacaggctttccgtcgccagccccgccgcctgcggaatgcgcatatacgctgaggtataacctcgccggtgcagccggagcgaagtatgcgcatcttccgtcaccgtctcaacggcgataccgccaatctcatccagcggcttacggcgaatcaccgcgcacgatccgcaaaagaaagtggcgtcccacatatcgttaccgtcctgtaccagtccgtaaaacagcgtgccttcgttaggcgttttacgaaaacgtcccaggttgcgctcaaacgggtccggggagaagaaatgatgcggcgtctgcatcatcgccagctgtttttctttcaggaaccagcccattgtcatttgcagaaacgagcgtgtcggcacatggtcgcaatcgaagatcgccacaaactcgcctttcgcgtgttttagcgcattgttgatgttgccggctttggcgtgttcatgcgtggcgcgggcaatgtaatgcacgccaacatgtcgggcaaaatgacgaaatgattcacgcccgccgtcatcaaggatccagatattcagcttgtccttcggccagtcaatgccaagcgaagcgtaaatggtatttttgaccacattaaggtcttcgttataggtcggtacaaaaatatccaccgtcggccactgcgacatttctttcggcaacggcaccggttgacgatttaacggccacaccacctggaagtaccccagcaccagcacaatccaggcgtaggtttccgcaaacagcagaatcagcccgcacaccagactgaccgggtcgtcccaatttagcgtcgaggtatagcgccaccagatataacgacaggagaccgttagcgacagcacgatgagcatcagcgcggaaaagcgtcccggcatacgtcgtaccaacagcgcaacgccccacagcaacagcagaaagataaattgcgatagcgggttaaatggctgcgtaatacagatcagcgccagtatcagtgaaaaggtcacgataacgcccagaataaaacgccgggcaccgttgctaagatgtcccagctctttttccttttccaggtgcgttgtcttttggcgcacccgttccggtaaggtatccatccattgatggtaacgtccacgaacgtccttcaggcgcgcaaatgaccgccagcgcggttcatgacgttctttagtcgacgagatcatcaccagccagagggtctgaatgaggtaacgggccgggtccagcgggcgcgggcgggcggcgttaatatgcggataaagtgctttatgctcgtcgcgaatacgctgccagcgcggatgctcaagcggaaaaactatccacgccagaatcatccacaggcagccgagcgctgcgctaaacggcgacgcgccgtggcggcggtaaccctgatagcgctcgctcaaacgcgcgctaaccggcgggataagcagccaccgggaaagggcgctcatcgcaggctcccggcggacgttttgtcgcccgcatcatgcagcaggcaccagttcgccagcgttaacacctcttcggcagctaacgaatcgctgcgatattcgcctaacggctgtttcgacgccatgcactccgccatcgcctcatcgcgatggatcacaatgggcagcaaccggcgctggctttgcagccagacctggtacagatcgtcctgtaactgactgccaatgcgtaagtcattgatcagaatatgcgctccggcaggcaacgcctgctgatgaaggcgaatatggcagttagcgtcaacccgggctaccgccagcgtatggtcgcagaggctcaccagctgccgtgtcagcggtgacgcgccgtagggcaagtccagtaaaatccagctataacgcccgctcgctttcagcgcctggatagccgatccgatctctcccagcgtctcctgccaggactgcggattttcccgctcttgcgcggtgagctgtccaaacggcagtagatcaagctgtgaggtataacgtaatccggcatcgcgccagtcctggccgtccagcaacgatcgcgcccaaccgccctgatggacgaagtcgacgttaaacgacatgcgcagcaggttatcggggctggcgtcaatcaccaggacattttcccctaagatttgtaacgcccaggcgagtgctgcggtgagagatgtggttcccaccccgccgcgcacgccctgcagtcccagaatcgccattcatggcttccttaatgaatgtggttgcgcaaattcagccaggagcggccatcttttaatcgccgccgccaactgttcgcgttgggaaatatcggtataatctatttcgggtagtgaaaacgcctggcttaatgccagaaaatcattttgaaaagtgtagcccaacgttggatcggactgagcgccaggttcattgttatacattctggttgctcctttttaaatatttctcactggcagcattacgccccgtcgtcaatacgggagaacgcgcatttttcatctttccgtgacatcatttataatgtgtaaaaatgcaaagcgcagagttacagggcatcctgccgggcaaattgattcacatgctaaatctgatgcgttttaatttcaatgttaggtttatttctgtgctttcgctagtaaactgataaacagttaaaatagtgacatgagggacactgtggaccccgtattttctctcggcatctcatcattatgggatgaactgcgccatatgccaaccggcggcgtctggtgggttaacgccgatcgccagcaagatgccatcagcctggtgaatcaaacgattgcgtcacaaacggagaatgcaaatgtcgccgtcatcggcatggaaggcgatcctggcaaagtaatcaaattagatgaatctcacggtccggagaaaatccgcttatttaccatgccggattcagaaaaagggctatactctttgccccacgatttgctttgttctgttaacccgacgcattactttttcattcttatttgtgcaaataacacgtggcggaatataacgtcagaaagcctgcataaatggctggaaaaaatgaataaatggactcgttttcatcactgttcattgttggttattaacccttgtaataatagcgataaacagtcctcgttgttgatgggcgagtatcgctcacttttcggcctcgccagtttacgttttcagggcgaccaacatttgttcgatattgccttctggtgtaacgaaaaaggcgtcagcgcccgacagcagttattgctgtgtcagcaggacgaacgctggacgctatcccatcaggaggagacggcaattcagccgcgtagcgacgaaaaacgcattcttagccacgtcgccgtccttgaaggcgcgccgccgctctcggaacactggacgcttttcgacaataacgaagcgctattcaacgacgcgcgcacggcgcaggccgcgacaattattttttcgcttacacagaacaaccaaatcgagccgcttgctcgtcgcattcatactttgcggcgccagcggggaagcgcgctgaaaattgtcgtgcgcgaaaatatcgccagtttgcgcgccaccgatgagcgcctgctgctgggctgcggcgcgaatatgatcattccctggaacgccccgctttcacgctgcctgacgcttattgaaagcgtgcagggacagcagttcagccgttacgtaccggaagacatcaccacgctactgtcaatgacgcagccgttgaaactgcgcggttttcagccgtgggatatcttctgcgatgccatccatacgatgatgagcaacaccctgctccccgccgacgggaaaggcgttctggtcgcgctgcgcccggtgccgggcattcgggttgagcaggcgttaacattatgtcggccaaaccgaaccggcgatattatgaccatcggcggcaaccgtctggtgctgtttttatcattctgccgggtcaacgatctggataccgcgttaaaccatattttccctttgccgacgggcgatattttctctaatcgtatggtctggttcgaagataaacaaatcagcgccgagctggtgcagatgcgcttattgtcgccggaactgtggggaacgccgctaccgctggcaaaacgcgccgacccggtaataaatgccgaacacgatggccgcatctggcgtcgtattcctgaacccctgcgattgctcgacgacaccgcggagcgtgcatcatgatgaccatcagcgatatcgtgcaaattattcttttttgcgcgctgattttctttccgctggggtatctggcgcgtcattcgctacgccgtatcagtgatacgacccggctgctatttgccaaacctcgttatgtaaaaccagccggaactctgcgccgcgctacgaaagtcaaggcagacaaaaaatgactcagcatactcaaactccatcaatgccttctccgctctggcagtactggcgcggtctttccggctggaacttctattttctggtcaagtttggcctgctgtgggcaggctatctgaattttcatcctttactgaatctggtattcatggcgtttctgctcatgccaataccaaagtatcgccttcaccggttgcgccactggattgccattcccgtcggcttcgcgctgttctggcacgatacctggctgcccggcccgcaaagcattatgagccaggggacgcaggtggcggaattcagctccggttatctgctcgatctgatcgcccgttttattaactggcaaatgatcggcgccatcttcgtactgctggttgcctggctttttttatcacagtggattcgggtcacggtgtttgtggtcgccatcatggtatggctgaatgtcctgacattaaccggcccggtttttacgctgtggccggcaggccagccaaccgatacggtgacgacaactggcggtaacgcggccgctaccgtcgcgacagcgggcgataagccggtcatcggcgatatgcctgcgcaaaccgcgccgccgacgaccgcgaatctgaacgcctggttgaacaccttctatgccgcggaagaaaagcggaaaacgacgttcccggcgcaacttccgcctgatgcgcagccgttcgacctattggtcatcaatatttgttcgctctcctggtcggatgtcgaagcggcaggcctgatgtcacatccgctatggtcgcactttgacattttgtttaaacactttaattccggtacgtcttacagcggcccggcggccattcgtctgctacgcgccagctgtggtcaaccttcgcatacccgactttatcaaccagccaataacgaatgttatctgtttgataatctggcgaaactgggctttactcagcatctgatgatggatcataacggtgaatttggcggcttcctgaaagaagttcgcgaaaacggcggtatgcagagcgaactgatgaaccagtccggcctgccaaccgccctgctgtcattcgacggctcgccggtatatgacgatctggcggtcctgaaccgctggttgacaggagaagaacgtgaagccaattcccgctccgcgactttctttaacctgctgccgctgcacgatggcaaccacttccccggcgtcagcaaaacggcggattataaaatccgcgcgcagaaactgttcgatgaactggacgccttcttcaccgaactggagaaatccgggcgtaaggtgatggtggtcgtcgtaccggagcacggcggcgcgctgaagggcgacagaatgcagatctcaggcctgcgcgatattcccagcccctccatcaccaacgtcccggcgggcgtgaaattttttggcatgaaagccccgcatgagggcgcgccgattgatattaaccagccgagcagctacctggcgatttccgaactggtcgtacgcgccgtggacggtaagctctttaccgaagacagtgtgaactggaacaagctgaccagcaatctgccgcaaaccgcgccggtttcagaaaacgctaatgcggtggtgattcagtatcagggtaagccctacgttcgtctgaatggcggcgactgggtgccttacccgcagtaaaccgaaaaaggccgcaaggtttcccctgcggcctggttcgggcgcatgttgccattacggcggacagacgctcaaaacgcgttacttcctgtcacgtagccagttgacgatcacactggcgataatgccagcaatgatcggcgctgccagatcgtgccagaagaccacgcccaactgcgtaagcgtcatatagccgccttgttgcaatggcaaccgttcgcggctatccttaaagtgtttgggttcaagttagcccccgtcaggttgccaagtttataccagtcaacgtgcgggggttttctctatccagcaacctatgccgccggggatcaaccccccgcaacattgcgcctcaccgggtaaacccggcttgctgctgatattacggcaaaatccccgtcccggcacggcgctaacgtgcaatctgcgtgacgcttcgcagacgattacttttatttgccagaatacattcagcatttctgaggctggcagtcagccgctcaattctgtaaattatgcctcctcgcggccagtcccggtgataccgaaaccctcgttcagcatcctgcgtctatgacatattcgcctgttgcgccagaggaatggctaaaagcaggtattaccgacgaacttatccgtctttcagcgggacctgaagatcccgacgatattattcatgaccttgaacgcgccagcagaaaagcagcattctgacgattgctcggcgaaccgctgtcaccggtttgccgcatcgggtatcaaggcactatagcctggttataggcagcattctttatgagagagctgcctatattttgggcagggggctctatgcaggacgacacattaccattaaataacagtaacgctacgaccacaccgctttcaacgagattaccgtttacaaaatatgattttggctgggtgctcttgtgtatcggtatggcgatcggcgcaggtaccgtcttaatgccagtgcaaatcggtctcaaggggatctgggtatttattaccgcttttatcatcgcctatcccgctacctatattgtgcaggatatttatctaaaaacgttatctgaaagcgaaacctgtgacgattatacggatattatcagtcactatcttggcaaaaactggggcatttttctcggtgtaatctattttcttatgattatccacggggtgtttatttattccctgtcggtggtgtttgatagcgcctcctatatcaaaaccttcggccttactgaggtcgatctttcgcagtctattatctataaagtcgcgattttcgccgtgctggtggcgattgcctccggcggggaaaagttattatttaaaatttccggcccgatggtggtggtaaaagtcgggatcattctgatattcggtttcgctatgatcccacactggaatcttgataatatttccgcctttcccgccgcatcggttttctttcgcgacgtactgctcactatcccattttgcttcttttctgcggtcttcattcaggtgctaaacccaatgaacatcgcctatcgtaagcgcgagcctgaccgtgtgctggccacccggatggcgattcgcacgcatcgcattagctatattacgctgattgccattattctctttttctcgttctcgtttaccttttcgattagccatgaagaggcggtatcagcgttcgagcagaatatttccgcccttgcgctggcagctcaggtaatccctggccatatcatccacattacctctaccatcctcaatatttttgccgtacttaccgcgttctttggtatttatttaggttttcacgaagcgcttaaaggtattgtactgaatgtattgagtcgtattatggatgtcaaaaacgtcaacccactgttactgacatctggtatctgtgtctttatcgtggttactctggttatctgggtttcgtttcgcgtctcagtattggtctttttccagttaggcagtccgctttatggcattgtcgcgtgtattattccttttttcctgatttataaagtagcgcaactggaaaaattacgcggcctgaaaacctggcttattctgttatatggaatattgttgtgcctgtcgccgttattaaaattgattgaataagtcgtaccggagagccatgcccggtggcgctacgcttaccaggcctacaggtacggtgtaggcttgataaggcgcagccgccatccggcataaaacgcaattaactcaacggtttctgcgggttttcatcctgatcgacggcaaagcaggccaccaactggccgtcgtactctttaagctgcggctgtaactgcgtacagggtccgaagcgacggctgcagcgggcgttgaaggcgcagcccggcggcgggttcagcggactcggcaactcgccggtcagcttaatccgctcacggcgatcgtccggattcagccgcggcgtggcggagagcaacgcctgggtatagggatgacgtggattgttaaaaatctgctctttggtccctttctccacgcagcggcctaagtacatgaccatcacttcatcggcgatgtgttccaccaccgacaggtcgtgcgagataaagacataagacagccccatatcctgttgcaaatccatcatcaggttcagcacctgggcgcgcaccgacacgtcgagcgcggagaccggttcgtcggcaatcactacgtccggatcaagcatcagaccgcgggcgatagcgatacgctgacgctggccgccggagaacatatgcggatagcggtcgtagtgctcggttttcagccccaccttcgccatcatcgccagcgctttttcacgacgctgcgctttactcaggctggtattgatcagcaacggctcttccagaatttgccccactttcttgcgtgggttcagggaaccgtaggggttctgaaacacaatctgaattttctgccgccgcagtttctgcgcgtgcggatcgtgtttgagcagatcctgcccctggtaataaagctcgccgccggttggcgtttcaatcatcgtcagcaggcggcccagtgtggattttccacaaccggactcccccactaccgccagcgttttaccgcgttcgagattaaacgacacgccatccagcgcttttaccagccgttccggagaaaagatccccttcttcaccggatagtgttttttcaggtcgatagcccgcaacagcggctgttgcaaggtggcctcatgcgtactcatagtgtgggcctcccggcatcatcgagtgggtaatgacattttgactgacgtccatcgtccagttggttgagagcaggttcttccgcacgacatctgtccgtggcgtaggggcagcgagggttaagcagacaacccgtcggtcggtcatatttccccggcaccacgcccggcagcgacgccagacgcgctttatcttgcgcaaactctggtaacgcacgtagcaatgcctgggtatacggatgacgcggcgcgcggaaaatatcctgcgcagcgccggtttcgacgacctgcccggcgtacatgacgataattttgtgcgccgcttccgccaccagcgccaggtcatgggtaatcagcaccagcgccatgttctctttttgctgcaactccagcagcagctcaatgatttgcgcctgaatggtcacatccagcgccgtggtcggttcatcagcaattaacagctttggtcgacaggctatggccatcgcaatcatcacgcgctgactcatgccgccagaaagctggtgcggatagacatccagacgagaagccggatcgggaatacccacctggttcaacaggtcaatcgctcgctgacgacgggttttcttgttcccgccctgatgtaccttgatggcttccataatctgaaagccaacggtatagcaaggattgaggctggtcatcgggtcctggaaaatcatcgccacttcagcacccaccaggttgcgacgttccttctcggaaatgcgcttcagatcctgtccgttaaagagcaggttttccgccatcacgcggcctgggtaatcgataagccccataatcgccagcgagctgacggatttgccggaaccagactcgccgacaatcccgaccacctcaccctgcttcacgctgtagctaatgcggtcgacggctttgaacggtgtcccttcgtcgccgaagtgcaccgataattgatctacatttaataacgccatctcgaacctcttactgcttcagtttgggatcgagcgcgtcacgcagcccgtcacccatcaggttaaatgccagtaccgtcagcagaatcgccagccccgggaaggtcacgacccaccaggcgctttgcgcgaactgcagaacgtcagagagcatggtgccccattccggcgtaggcggctgtgcgcccatccccaggaagccgagggcagccatatcgagaatggcgttagagaagcccagtgacgcctgaacgatcagcggcgcaaggcagttcgggaaaatattgacgaacatctgacgcatcgcgcctgcgcccgccacgcgggaggcagtcacataatcgcggttcacctctaccagaaccgccgcgcgggttaagcggacatagtgcggcagcgccacaaacgtcaacgccagcgcagcgttgccgatggaggggccgaagatcgccaccagcaccagcgccagcagcaggctcggcagggccagcataatatcgaccacgcgcatgatgatgttatcgaccagaccgccgaagtagcccgcgaccaggccgagaatgatccccattaccagcgacaggacgaccaccagacagccgaccagcagtgacaaacgcgcgccatacatcaggcgcgagaggacatcgcgaccaacatcatccgttcccagaatatgcgcccaactgccgccttcctgccagaccggcggtgccagcagcgcatcacggaactgctctgccgggttgtacggcgcaataaagttggcaaacaccgcaatcaggatcacgatgagaacatacgccagcccgacgaccgcgcctttgttgcgtttgaaatagtgccagaactcccgcaatggcgtcatgggcgccggtgcggcattaacattattttcagtaacctgtgacatgatggccccttacttcttatgccgaatacgcgggttcaccacgccgtacagcaggtctaccagcaggttgacgagaataatcatcgtcgctaccagtaacacgccgccctgcactaccggataatcgcggcgttgcagcgcatcgatcagccagcgccccagaccgggccacgagaagatagtttctgtcagaatcgcgcccgccaacagcgtcccgacctgcaggccgatcacggtgacgactggcagcatagcgttacgcagagcatggacgataatgacgcgcatcctggtcaaccctttggcgcgtgcggtacggatgtaatcctcccccagcacttccagcatcgacgaacgggtcatacgcacaatgacggccagcgggattgtgccgagcaccatcgcaggcaggatcatatgcgccagcgcatcaataaagttaccctcttcgccccagatagcggtgtcgatcagcataaagcccgtcaacggattggtatcatcaaggaacaccatatcgctcacgcgcccggaaaccggcgtcaggttccagtggacggaaaccagcatgatcagcatcatgccccaccagaagataggcatagagtaaccggtcagcgccaggccaacggcagtgtgatcgaagatagaaccgcgcttcactgcggccagcacgcccaccggaatccccacggcgacggcaaaaatcatggcgcagacgccaagctccagcgtcgctttaaagcgaggcacgaactcgtcccacacggggattcggcttttcagcgagatgcctaaatcgccatgcatcaccccccagatataatggaggtactgctgccacatcggtttatcaagaccgagttcagccagcagttgagcatgacgctcaggggaaatacctcgctcacccgccatgatcatcaccggatcgccggggatcatgtggacaaaggcaaaggtgagaagggtaataccgataaacgtcgggataacgagtcccaaacgtcggagaatgaactgcaacataacccgaattctctctcatgacgcacggcctggaaccgtgagtctgtattgctcacaaatcttatcccacgcaaactgcatcgcggataaagcattacgccggatggcgctgcgcttatccggcctacacaacaccggggcgcagcgctcttttaattattcgacagagacgttttcgaagtgatgtttgcctaatggatcaaccacatagcctttaacttctttacgcactggctcataaaccgtggagtgagcgatgatcagcgctggcgcctggtcatgcatcacaacctgggcctgtttatagagctcaatacgcttgttgtggtcatcggtcgcacgcgcaggctgaatcaggtcttcaaacggcttgtagcaccattttgaatagttggagccttgctgggcggcatcgcagctgaacagagtggcgaagaagttatccggatcgccattatcgccggtccagcccatcatcaccgtctggtgctcgccatctttagcgcgcttgaggtattcgccccattcataggtgacaattttggcctgaacgccaatcttcgcccagtccgcctggatcatttccgccatacgacgcgcattcgggttatagggacgctgtaccggcatcgcccatagatcgatggtgaagcctttttccagaccggcttctttcagcagcaccttcgctttttccggatcgtagccgtagtctttaatatcgtcgttgtagccccacatcgtcggcgggatcaggtttttcgccgcaacgcccgcgccctgataaacggctttgatgatggcctctttattcacggcataggtcaacgcctggcgaactttgacatcatccagcggttttttctgcacgttataggagagataacccacgttcagaccggcctgctccatcaggttgatgtttttatcttctttcatgcgcgcaatatccgccgggttcggatacggcatcacctgacattcgttcttctgcagtttggcgtaacgcacagaggcgtcaggcgtgatggagaagaccagacggtcaatctgcggcttcgtgccccagtagccgtcaaaggctttgtagagaatgcgggagtctttctgatattgcaccagttggaacgggccagtgccgaccgggttcagatccactttttccggcgtaccggctttcagcatgttgtcagcatattctttggaaagaatagaggcgaagtccatggctaaatcggcaaggaacggcgcttccggacgcgtcagcacaaactgcaccgtgtgatcgtcgaccttcttcacttcgctaatcagatccggcagccccatgccttcaaagtattcatagctgccgccagacactttatggtacgggttctgctcgtttttctgccggtcaaaagagaacacgacatcatcggcgttcagctcgcgcgtgggtttgaaatccttgctggattgccatttcacccctttacgtaggtggaacgtataggttttaccgtcttcgctgatatcccacttctcagcaagacccgggatcacttccgtggtgccggttttgaattcaaccagacggttatagataggtacggagctggcatcataggtggtgccagacgtaaagagctgtgggttaaagccttccggcgagccttctgaacaataaaccagggttttggcctgcacgcttgctgcaacggtcatggccaccaggctcaaaccaagcttcagcatccctgacttcttcaaggaaatactcattcttctgctccaattgtgatgtatgttgttttgccctttgcaaaggcttttaccgcccggccttttttgttttttacctggtcaggtcagtagtgagaggtggggattccgttcgcataatcgactgagttgcagtgcggattctccataaaatgcccctcattccctacaatctgtcaatagaatgtcaaaacgtcaatacaggtaaccagcttttacaacaacggtgagaattaacaaacaaagattaaaaaaagttcagaagggtattttcagcagggaaatttgtgctatggccagaaaggcagagttattcacttaatattttgcaacagttagtgattaacaattagacattaattgaaaaatttctttcgatatgttgattatctgagcgattaataccactaacgctaaaacgcacaggcgaaaatgctgaggttatccataagccgtgtgcaaaaaagagttatacggacattgaaaaacaccatcgaatatgtcacaaaattgtaaataagtaggccgtcgtgcggcctaccgcgatcacaaaaactaacttttgaccctggcctgcgtgcgcttttcgctccagttaaacaacgagttcaccagaatcgccgtcaacgtccccgctgccatgccgttgccaaagaccatctgtacgcccgccgggaaattctgatacaggccgggtaccagtataggtagcattcccatggccagccccatcgccagcgcgtaggttttacccggcgtatgcagtggctcacgcgcaatcatatcaataccgataaccccgataatgctgaagacaatcaccgccgtaccgcacaccaccgaacctggcagacaggtcgccagacgtaccaacggtgcgaatatggcaatcaggattaacaatcctccggcagccgcagtcacgaaacgtgatttcacattagtggtgcgtaccaccccaatattttcgccggaggtgataattaaggaggtgccaaaaatcccccccagcagcgacattaccgcatcaccacgaatggtgcgtggaatcgcctgctgcacattttgcgtggaattgactatttccgcggtcgcaatcgtttgcccggttgcttcagccatagagatgaccgcgtaaatcagtaacggcagcgaggcggagagatcaaaaatcggccagccgaacggcaaaagctgtgggaaactaaacagcggcccgtgactaacaccgctaaaatcggtgctgcccagcgccattcccagcagcgttcccgctaaaaggccgaacatcaccgccagctggcgtaaaataccgctaaacgccagcgcgaaaatcagcgttatcaggatagtccccagcgataaaatgatactggttggatgagcgaagtcggcgctccctggctggccaatgatcaacccgccgtacaggcgaataaggttaatcgacaccattagcagcatgatgccaatgataaaggggggaaaatggtgcaggcagcggcggaaaatcggcaacgcgataaagtagaacagcgaggtcagaattacggcgccaatcgcggtctggatattggtctgtaaagcgatcgcaacgaaaatcgcaatcggcgcgccccccggtaccataataaacggcaaacgcgcgcccacccctttcacacccaggctttgcaaaatagcgcccagaccgcacatcagaaaggtcgcgctaagtaccgaggcggtcaccgtatcggtaaagtggagcgctttggcgatcagaaagacggaggtaatgggggtggcggcaacgaccagcacatgctgaagcgccaaaagtaaggtggtttgccagggtaatgcatcgttatccggcgtagtaaggccaggctgcggcatgattaactcccataaaacatcaaaaaaataaccgccagcgcgggctggcggtctgcattatttcaaccaactaatagcatcagcggcatagcgatgcgcacggaaggcgctgttctgttttccaggaataatgcctttactgaggtgctccggatattcattaaagaacggaatgatatattcccataccgtttcgccttccggggtgacttcaaacaggcggccaaacgccgattcacagataaaggtgttgccgttcgctagccgctgcgcgctccccatatacggcgagaaaaacgccggcgggaagatatcgcgatactgccaggtaatcgctttggtctgcggatcgaactccagcaccgtggaatgcggcgaggtgacgccgggacgcaggttgccgttatcgaaaaccagaatcgacccgttctccatctcaaccggcgtgtgctgctgcgctacgacttccggccctgcatgccagataaccttcccgctctctttatccacggcaatgacgccggaagtggtacgcaggctcatcagtaccaggccatcacgggtgacggacaggccgttaatcatcggccagtggcggcggtcgaaaatatcatgaatcgggaaatcttccggattcaaatgctcccaggcacgccattcccagaccacttcaccgtcgcgattgacctctttgacgacgtcgctctgaatgatgccgtccgacgcatcgcggcgcgggtcgccgccggtaacacgggcggcgatatcggcaggtaacggcgacgcggcggtatacagcaggttaccgttttccagccactgagcatcatggtgatggaagatgtcttcatagtgccagacgatttcgttatccggcgtcacttcgtagaagtcgccgccgtgccagagatcccacgccggatagaggttcgctgaagtgcggtggctgccgttataacccagattaccgttcggcagcagcaccgcatcacgcccggcgcgaaccggaagctgccactgatgcgcgacttcgccctgctcgtccaccaggtaaacccgcccttcggcggtttgcggcgcaaaaagcgtatagccgccaaagctcttcgccttatcagcgtagataaggcccgccggacggcgtccaagggtaaaagtcgagtcctgagttaagtgtgccacatcgcctcctgaggaataaatttgcgccaaaataccccattaaaacgttttaatgaagagttttttacgatcctcactgaaaaaaagcaaacgttaccgtctggtaaatatgctaccctgtgcgcaaattttcgcaggtcaggaagcagatggctgttcaaaataaaaaacgcgcaaagttgattgatgttgcccgccatgcaggcgtatcgccagggacggtatccaatgcattgcacaacacccgctttgtcgagccgcagacgcgacggcgtattgaagaggccattgttgcgctcaactacacgccgaatattcgcgcccgccagttgcgaaccggcaaaaccaataccattgccttgctctcttcggtgccgctggcgattgcctccggcgcgtcacgactgggatttatgatggaggtggcgttaacgtccgcgatgatggcgctggaaaaacagcatgcgctgattctggtgccgccgggggcaaatccactggatgccgtcagctttgacgcggcgatcctgattgagccggcggagaacgacccgcagctccaggcgctggcgcaagcgggcattccctgcgtcaccattggccgcacgccggggaccgacacgcctgtgccgtgggtggagctgcactcggcggcaacagcacagcttctgctaacgcatctggaggcctccggcgccagcaaatgtgcgttatttgtcggtaacacacggcgaacatcagttctggagagcgaagcggcttaccagcgctggtgcgcgggacgccaggcccccgtcgtctactctctcaatgaaagcgagggtgaaaatgccggctaccaggccgcgcagcagctattacaggcacatcccgacgttgacggcgtgctggtgctgatcgacacctttgccagcggcgcggtacgcgcttttcaggaacaagacatcgccatacctgaacaaatgcgggtggtcacccgctatgatggtatccgcgcgcgcgaatcgctgccgccgctgacggcagtgaatatgcatcttgatgaggtggcgcgacaggcaatcacgctcctgtttgccgttctgtcgggtgagaaggtcagctacagcgacgggatcatgcctgaactggtggtgcgagcgtcaacctgccggtgacagaggatgacttgccactgcgggccgttgctgacgcaacgttctctcgcttcgctcgagtcgaacctcttgcccccggaggttctcatcctcgtcaggcttcagatacaaaaaaaacctgctcgctgagcagggtttctgaatttggtcggtgatagaggatgactcgccactgcgtggctcgccctgcgggccgttgctgacgcaacgttctctcgcttcgctcgagtcgaacctcttgcccccggaggttctcatcctcgtcagacttcagatacaaaaaaaccctgctcattgagcagggtttctgaatttggtcggtgatagaggattcgaacctccgaccccttcgtcccgaacgaagtgcgctaccaggctgcgccaatcaccgaatgcgggcgcatcttactgctcaggcgcacgcccgtcaatcccttagtcgcaaaatacaattcaatcggcgagaaagtcggcagacaacctacttcgcggcgactttctgcgcatcgggaatatggcaccagttgttgttctggttaatgccgccattcggcgatgtataccccaggcagcccattatcgtatcgtacagttccacatgacgacgcggcactttgatctccgcctgctgtttcaggtgagcgaacatctgcgcatgttgcggactggcaagatatttatccgacatccataccagcatcggaacacggaattgttccggcggcgccatattgcgcggcgtaccgtgcaaatgttcacgttcgttaatcgactcgccgtggtcagcggcgtagaacacaatcgcttttttatcacgtagctgatcgaacacactggtaataaagtgatcaacataggtcacggagttatcgtaagagttgatcatctgcgctttcgtgcagccgctatcgaccccaatacattcgggcttccactgagcgtagctgcgcggataacgttgcgtatagttaaaatgcgatcccttagtatgcaggataatcagatgtttaccctccgggttctgggcaagcgagttctgcatctcatcaatcaacagcatgtcatcaaccgttttaccacggttacgcggctcggcgccaatctgctcgcggtaggagatattatccgccatggtattgctataaaaccacatctcgctctgcatggcgtacagatcggaactgaatccgagctgtttgagtacggcaaaaacattctgctcttttaacgtacgctgcgggttattatccgccccaccttcccgtacaaacatacagcgtaaagaaagcttcgtcgcggtatcgcaggaatagccgcggaatgccgccagatttttttcctgcgccagcttcggcgtggtattacgctcgtagccgaaaatccccatgtgatcccaacgggtcgtctcaccgataatgaaaacgacgtaggtgtcatccccatctttcggcgcaacataggtaaatttcctggccgggtttattaacgaattattgtccgacgattcatctacctgcgcccaggcatacagccctaacgcagataaccagtttgaaggcagataggagttcgccaccacgccgccatagctgggtaagtcgatgcctgtcgcccgttcaacctttttttgctgtatatccagcaggcggataggcgcccacaccattacgcctgcgagtaccactacagcggcgctgcgaaaacgctgccccggcgtacgtagctggcgcaacaacgtgtagcgacagtggttactccagataaagatgagcggaagcacgctcacggcaatcagccacaatacaaagtgcagccccaccacctctttcgagagatcgatatcggtggtcataacagacgcaataatgccgtagccaatcaccacgttcaggaaggtcatgtaataactggcgccagcggaaaacagcaccaccagcgtggccagcacacgccagacgcgtcggccaaacagtgaaagaagacgaagtaagaagaaagtgaccagcaccgtggcgcccagttcgacaactgcggagaggcctttccaaatggtaaattcttgcgcataactgccgaaacggcggtaaaacacggcgcaattcataaacagaccgatatagagcgcaagcaagaaactaagtttctgttgcgtcatcgatttaatgtatctcatgcaaacaaaccctgggaatcgggataaaaacgacctgtacaacgattctgtaatcaaacaggtaaatatgcggctaacgcagatgtaagaaagtctacaagcacggttaagtagaccacaagcagaggggaaagtggcaacggagagtgtgatcggagaagatttttacaaaaaatcactaaaaatggaaaagggccagcgaactggccctcagtgattattcgtatgtgacgctaaaattcaccgtcgcattcgctgtgccaacggtggcatccggcttaacaggcacatagctggcgatatagttcagcttgttcgtaccatcaaaccagacagtgtgttcgacaggcgtagagtcggtactggaggggtattgttgctccccaccagatgttttaatttttaacgccacgcccgtcgcgccgccgctatccagggcaaaaagcgaggggtcagtcgggtccggagaaccgtccatcgtaacgctggcctttgtggcatacgcgcaatcttttaagccgatgctaaagtttttctggttcagctctttacccacttttaccgggcgctgaagcaccacggtctccatattgacgtcgatactgtcgttttccagttcacaggtagccgccttaatagtaatggtaaagtggatatcaccagcagaaccgatattagacggtgccgccatcgcggaagcggtaagcagtaaacacgctggcatcaaagcatgaaggtttttcatcctgcttactccacatcaatacgcatggtggcaattccctcgaaatccccggcggccggcaatttgccggtggtactgatggggtaagccgaaatggtcgttgaggcggtacggtgcgtgtcgtcaacaagacccgatacgctcagctcctgattaacactggcgtcatttggcaccaaaattttaccgttagcgccctcaatgacggcaccgatatccgggttgcccatgtcgatggcattcgaatcattagcgtttggcattccctcaatacgcaggaagatctttatgccatccgagatattggtgcatttaaactgcagctctttggtgaatttcgtggcgttctttgcaacttgtcctttgcgatctttaaaatcagtggccttaaattccccaaacggaatttccagcgtgctgccgctggagagttcacagccctgaggtaccgtaattgaaccactgatatatacagacgacgcaggtatactgccatatacactgggtttctttgtcacaaaaaggtccattattttggtgctaggtataatactttcacccacaaacggatggagaatatagagcgataagtgacctttgccaccggatgtccatattgcatctttactacttgcattttgcgaacactgagagcggttgtttgtcaggttacctacattctcaaacggtgtgttaacgtattctcctcgtccccccgaaatcagtacatcgctcgcaatggcaatattattattgatctggtaataggagcgactctctatattcgtaacaaaggccagaggaaccacagccttaaataaggtgtcatttataagagaggtatcatcagggcattcacaggacatcgcataggttccacctaaattccagctatcgaaatctacgaaggtcgcacccgttgtgttctttgacgtatctgaaactgttttatttatggtggcactgaagatatgtgttccaccttcaggagtacatggtccaaaatctgccgctgccagcgcctgccccgaaaacagcaccgacccgcccaacaggcccgtaaacattatcaactttttcaacataatcgtttccttccctgttaccggcagacggcattcgccatcaccacgccggtattatcctgttgttccggcagcgtaaacgccacgcggcattgctgtgcctggtctttaccccagttcacctgaagggcacctttctccggcatcccgctgatataaagctgaccgtcttcacccacaatgctgctggactcttttgtggtatccagcagcgtggcggtagcaccaaacggcaccgctttgccattggcctgcgtcagattcatcagcacgcgatagcccactcgggtatcgaagcgggcacgaacaatcgcgccgcgtgtcggcactacgttgacggaggcggtatccaggtcaacctggttgttcaggctgtcgcttcgcagtgagacttccgtttcacggtacggagtaaggtaaggcacgaccgcattacccatccagtccacttccacaccaccgttgttgatcacgtgcgcgccgcgcgcgcccggcgcggagataatggccatggactcacccagcggttgagaaagagtgataccttcgctatgggctatcacaccgccgcgcaaaccgtagttcacctgctggccgtcacggttgtagttgtaacccaggctggcgctacccacgccgccctggtaatccaggttcacgctgccgctgttacccacgccgttgctgccgtagccttcctgtacgctatagttcagattgcggtcttccagcgcggtgccgctcacccctaactgctggttggttcggccatgctgatcggtcgtgaggtggtagttactccacacgcgtcccagaggaatcgacatggagaatgacagtaaacgatcgctctcatcccactccgggcttttcgtccaggtgtaagcaacgctgtagttcacgcggccaatacggccgttataaccggcattcagcgaacgctgtttaccttcatcgttccagtaatcctgctgcgtgacgttaaaatagaccgagccccaggcgcccagttgctgcgtcacgttgccctgaatctgactacgtttgtggtactggctataagagctgtccgcatcgctgcgcacatccgtcgcttcctggaaggtgtaatagccgctggtcgaatacttgtaacccagcagacggaaatcggtaccgctgttaaagctcttggaatagaggaaacgataagactgaccttccgaattctcctcatttgccagcttgctttttgcctgggttacatcgatggagatcgcgccgatatagccgaagtttttacctaatcctcccgccagcgagtaatagttgtcagagaagatcgcaccaccgtaaacggtaaagccatacggcaggccgtacatggcatcaagctgcccgaattttggctcggcgctgttatagttcccggcacggtattccccggcggaaaggctgtatttgagatggccttcacgctggaggagcgccaccgaggagaacggctgaacgaacttctgctcactgccgtccgattctttaatggtgaccgtcaggtcgccgctgtttgaggttggatacaggtcgttaatttcaaacgcacccggctgaacaaacgtacggtaaataacgtagttgttctgctcaacggtaacttcggcgttacttttggcaataccccggatgacgggcgcaaacccgcgctggctgtcaggcagcatctcttcgtcggaagttaactgcacaccgcgcatctgaacgctgtcaaaaatatcaccggcggtggaggtatcccccaacgtcagctgtgatttcaacggcacaatggcacggcttagagatgtgccaatgttatcccatgtgttgttaccgtcgtttcgcgtccaggtgctatagttacgtaaccgccatgcccccaggttcataccgctgcgcagattcagatagtagctgtcgctgttgtagctggtttcactgtcgtgtgcgtcatagctggcgttgctgccggaaaagttataatccaccagcagggcattcaccccttcgtcccactgcgattctggcaccgtaccgcgcgctgtctgcgtcatcgcagcctgcgggaagctcatgatcagggtctggtctgcaaagtcgaaatggctggcggcctggggaataatgtcgtcaaaagcaacacaggcttcaggcggggccattttcagagccgggaagctatcaatacgcacgcccatatcttcaagctgcacgcggcttaagcacggcaccagggattcacccatttttgcgcgctgcgcctctgtcgctgccttaaactccagggtgcgagactccatttttttttcgttgaccaccaccgagacgcggtatttacctggcaggtgttcagctttattggattcatacattgaaaggtcaacgtgctgatcaatacccggcacatcctccagaaagcgcgggttaaatgttcccgcatacgcggggagcgtacccgctatcatcagcgcaagcgcagactgcgtgaaacgcgaggtcttattgcccagaggaagatgcgtccatgtcatagtaataatcctttaaaacgcgttagttaacgcgctgtgtcaacatgtcgccagccgtgccaaagtcattaataatgttgtatttaacttcgcttaccttgccggtgccggctggcagttcaatattcaatgagccttttgccggaaccattcccgttttttcaatatcacggccgttggcataaaatttattaaacgtcaggttaaaggcagatgggttttccactttgatctggttagcccctgcgctggtgaactgcagtttgttccagccgtccatgctattgcctttcaggcccgccgggcgatagaacagttttaagcgggtacgtacggcgatctgcagtacgtttttagcttccgcgtcttcacttttggcaggaatagcttttacgttaatccaataaacggactcgcgatcctgcggtaacgtgttcgtcgtattaacaatacgtaaaacgttatttttagtcgggcttaatttaaataacggtggagtgatgataaagggcgtctttttattaccgttagcatcatcaatccatgactgaatgagaaattcatccgtggtgcttttattatttaccgtaagagaagcttcctttctactaccgtcataaataacacgcgtgctgcttaatgccacgcctccggcaaaactgttttgagcaatcaacgccagcaccagtgctgtgcaagatatcaaacgtgagcggttcatgattctcttcctgagcctccgctggaaaaaatggcaacgggatttccgttgccattatgattgtctgtattaacgaaaattcgattattcgtaggacaggttgaagtccacttctgcgttaccgtaaccagtggttacagtatcttttgttgcaacgtagttagcggtgtagtacagcacggtctgaccagcagccaacgtagtggtggatttaccggtgttcatttcaacaagcttgttagcgttgtcgtagataccgatgcccacgccagttgccgcacctgcttcagtgttaacagaaaccagtgtcgcatcgtctgtatcaccaacgccattgaagcttacgttaactttggtattagaggtgatgtcacagtcttccagtttgatctggaaaggcttagaagaagacttgtcgccaatggctttgaagatatttttcttaacctgacccagcacaacttcctggttctgagagtcagtagaaacgacgcatggcgcgtcaacgatttcaccggtgaatttaatggtgccgtcaccagattcagcagcgaaagcagaagtggaaactacagcgagagcagacagagcaaaaacaacctttttcattaaaaactccatttatgacggtagataatagaacgcatccttaggattatctgcattctgtgaggaaatggagtgtatagaggtgggtattggatactataattagtatatataaaaacaattgttagttaatcttaaaaagaatagaaatcaatatgttacaaatgcagcgtacataaatgtaattttttattaagaataaattaatataattaatatattatttcttcctattcataaataagttaaatgtcttccttatttattagacgtttttttaactacaattgattaggtatttgtgctaaataaaaaaaagggcaccaaatgggtgcgctgtacgcctggtgttgcatgtgttacgcagacgcttcgctaaccccctcccactgcggctggcgaatagtggtggaaagtgccagcgagataattaacagcgcaaagataacgcagaaggttagcaccctacttccgccacaagagctgttatcactgcgtttcgattataatttttaagttaaaacctggcgctcacccccagggtatacaaataatcgctatccgtagcgctattttccgcctgggaaaacgccgcatacgccgccaggtgcgggttaagtaacacgtccgcgcctacggtgacatccagccagtttcccgcctgatttcctgcggtcatacgactcaacccggactgcgctttccagatattctccccaaactgttggttatagctgatttgcgcccagggacggacatcgccgaactgcgagtttacccgccagcctaacgtactgacgctggcgtgccataacggatcggtaaacgctaatgtcgtcgcgctatcgccatattcgttatacattgatgacgtcgaaccgtcgtaatgcagcgccgcgaccggcccagtggtcacgcgtcgggaaagcggaaaattccagcccatactgataccgctggtcgcatcaagcggggtttcatccgccaggctaagcaccggccccactgtattttgcgtagactgaatacgttcggccagtatgtcgttgtaattcggttggtgatcgctgtcccaggtatagcgttccgtcgtatgccccggagccgcttcagcgatatattcttgttgccaggcatacgtggtattgataaaaaacgagcaggccataaggcccgccagacaacacaacgtccggcgaccacggcgttttcttacaatcatcaacgcgactccagagtagagccgaattcggcgatattattgtcattgaatgaaggatgtcgggcatcagccctgtattaactattgtccttttagcgggcccgtcaaggcgggttgaaggaaattttcgcggtaaccacaataacgaggaagtctatgcagcgttgcgactgggtcagccaggaccccctttatattgcctatcatgataacgagtggggcgtaccggaaactgacagcagaaagctgtttgaaatgatctgtcttgaaggtcaacaggccggtttatcctggatcaccgtgcttaaaaagagagagaactatcgcgcctgttttcatcagtttgacccggtacgcatcgcagctatgcaggaggaggatgttgaacgcctgctgcagaacacgggcatcatacgacatcgcggtaaaattcaggccattatcagtaacgcccgcgcctggcttgcgatggagcaaaacggcgagtctttcgccgattttgtctggtcattcgttgatggccagccgcagatcacccaggcggccagcctggataagatccccacctcaacacctgcgtccgatgcgcttgctaaggcattgaaaaaacgtggtttcaagtttgtcggtacgactatctgttactcctttatgcaggcgtgcggactggtcaacgaccatattaccggctgtttttgccatccgggagaaaaacatgattcgcaaatcccagagtgaagacatggcgtctattctggcgctgtggatgaaaagtaccatttatgcccatccctttatcgaagaacgttactggcacgagagcgaagcaattgtacgcgacgtctatttacccgccgcacaaacctgggtatgggaggaaaatggacaactgaaaggcttcgtcagcgtactggaagcccgttttgtcggggcgctgtttgtcgcccccgacgcgttaagacacggcattggcaaagcgcttctggaatatgtccagcaacgttttcctctgctgagccttgaggtttaccagaaaaatcaatccgccgtaaacttctaccatgcgcttggttttcgtattgaagatagcgcctggcaggaggataccgcccaccccacctggattatgagttggcaggcggatcaaacgccgtaagcggtagcgccgggccggtatatttctcaaaccagaccagcgcggtgttgcccgcacaaccgttccccagccgggaactgggaagatcttttgtcaggacgtttaccgcgccgtttttgcatatgccgcctgcggtaggttcagggtccggccatgcgccttcgtgaatacagataacgccaggccgaattccgtcggtaacgaccgcgcccgccagaacctgcccgcgatgattccagacgcgtaccgtatcgccatcgacgattccgcgcgttgtcgcatcctgcggatgaatcgtcaccggttcgcgtccggccaccgcataccgctcccgtaacgaactgtagttaagctggctatgcagacggtgcgccggatgcgcggaaagtagctgaacctgccccgcatcggcgttcccgtgccactcatccggcgccagccacatcggatgaccgggacaatccgcataaccatagctggcaatgcgcgcagaatagatttcgattttgccgctggccgtttttagcggatggttatcaggatcgcggcgaaaatccgcgaagcgcacaaactgcgcgttggcgggattttccggcatctccagtaaacggttagcctgccagaatgcggcaaacggcggcagcgtcaccccctggctggcgccacgctgggcggcaatattgtagaaagtctccagccacgccagctcgctttttccttcggtgaaccgagcgtaaccgccggcttcccaccgttcgctcagttcagcaaaaacgtcaaaatcattccgcgcctcccaccggggcgacacgacctgcttcatcggcgccaaatgctgattgctatagtcgccggtcatggttaaatcgttacgctcatagctggtggtcgcaggcagaacaatatccgcgtgtttcgcggcggccgtccagaaacattccgagataacgaccagttccggtttttgccacgcgcgaatcagacggttggtatcctgatgatgggtaaagttcgcgccgcccgcccaccagataaaacgaatatccgggaagcggcgatccatcccattgtgttggtaaaacccaccggggttttccagcgcctcgacaatacgcgccaccggtattttatctaccgcatcgaccccgccagggatgcttccctgcatcgaggctaacacggcggcgcggcgcgtcgggtttccgccgttagcaaaatgataagaaaaaccaaacccgccgccaggcgtaccaatctgccccagcattgcggccagcgtaacgatcatccagtgcttttgctcgccgaactgctgacgctgcattccccaaccggccatcaacatggtggtgttatgatgaaatatttccgccagttcgcggattttcaccgcagaaacgccgcaaatttccgccgcccattccgctgttttggccgtaccgtcggtcgtgcccaaaagatagtcggcgaagcggtcataacccgttgtgcagcgggcaaggaacgcttcatcctgccaaccgttttccaccagcgtatgggcgatccccaacattaacgccacatcggtgcccatatgcggggcgatccactccatcttatcgccaaaaaagtcgacgctttccgatcgcatcggatcgatgcagatcaggcgcttgccgctttgtcgcaacgccgcaaaatagtcgagcccctgttcatccgaggcattccaggcaattttcagagtattcagcgggttcgcgctccagagcaccaccacctcgctgtgttccagcaccaccggccagctagtctgctgctggtaaacctcgttgccacccaccacataaggcatgatagcctgcgccgcgccggtggaataatcgccaagatggccggtataccctcccgccagcgccatgtaacgctgcaatagtgtagccgctttatgcaatacgccgttcgaacgccaaccgtaggagccggcgaagatggacgatggcccataactttcgcgaatacgtttgtgctgagcgtggatcaggtccagcgcgtcatcccaacttacgcgaacaaactcatcctgcccgcgtatgccttgcggcttatcgggagaagccaggaaccctttacgcaccatcgggaagcgaacccgcgttttactgtgcacctggtcatgcacaacggtttgcagggagttctggtgtgccgtcgggagttcgccatacgaggcaaaaatgcgttctccgtcggtttcaacgcggactggcccccagtgtgcggcggtcaataccgaatgacgcgatggtgcgtgggtcaaggttcgctcctgaattattgggattatttattttgccgatcaatgttacttacaaatttcagagttttccctggaattttcttcatgtgcagacgtcataatcaaccgccacggtcgctgtggtaaaaataaaaaagtgataaggatttaagatgaaaaaacgtgtatttgtgattgctgccatcgtgagcggcgccctggcagtatctggctgcacaacaaacccttacaccggcgaacgcgaagcaggtaaatccggcattggcgcgggtattggatcgctggtcggcgcaggcatcggcgcgctctcctcctccaaaaaagatcgcggtaaaggcgcgctgattggcgcggcggctggcgcggcgctgggcggcggcgtgggttactacatggacgtacaggaagcgaaactgcgtgacaaaatgcggggcacaggcgttagcgtgacgcgaagcggcgataatatcattctgaatatgccgaataatgtcaccttcgacagcagcagcgcgacgctgaaaccggcaggcgctaacacgctgaccggcgtggcgatggtgctgaaagagtatcccaagaccgccgtcaatgtggtgggctacaccgacagcaccggtagccacgatctgaatatgcgtctgtcgcagcagcgtgctgactccgtcgccagttcgctgatcacccagggcgttgacgccagccgtatccgtaccagcggaatgggtccggcgaacccgatcgccagcaacagtacggcagaaggtaaagcgcaaaaccgccgcgtcgaaattaccttgagtccattgcagtaaactaccgtaccgggtaaggcggcatgctttacccggcctgcattattccctcgccagaccggatacacctcgcattattcggtattcattcaccatttaccacgatacggctgccgacaacgggaaaatcggctggtcgattattgctaagcgggttaataataagcctgttccggttggcgcatgccgcgcttaccttttgatttacggagagtcgcatgaagccgtccatcattctctacaaaaccctgcctgatgatttgctgcatcgcctggaggcgcattttaccgtcacccaggtaccgaacctgcatccggaaacggtagcgcgacacgcgcaggcatttgccagcgcgcaaggccttctgggcgccagcgaaaccgttaaccgcgcgctgctggaaaaaatgccggcgctacgcgcggcgtcaaccatctcggtgggatacgataatgtcgaggtggacgcccttactgcccgcaaaatagtcctgatgcacacgcctgccgttttgacggaaaccgttgccgatacggtgatggcattgatgctggccactgcccgccgcgtggtggacgtcgcagaacgggttaaggcgggtgaatggacagaaagcattggcccggcatggtttggcgtcgatgtgcatcacaaaacactcggtatcgttgggatggggcgtatcgggatggcgctggcgcagcgagcgcactttgggtttaccatgccggttctctatcacgcccgtcggcggcatcaggaggcggaggaccggtttaacgcccgctactgcgatctggatacgttgttgcaggaggctgattttgtctgcgtgatcctgccgctaacggcagaaacgcgacatctgtttggcgcaacacagtttgccagaatgaaatcgtccgccatttttattaatgccggacgcggcccggtggtcgatgaaaacgcgctgattgccgcgctgcaaaacggtgaaatatatgcggcaggtctggatgtctttgaacaggaaccgctatctgtggattcgcccctgctgaacatgtctaatgtcgtcgcggtgccgcatattggctcggcaacgcatgagacgcgctacaacatgatggcctgtgcggtggataatttgattgatgcgctgcagggaaaaatagagaagaactgcgtcaacccgcaggcggcgggatagcgctacaggcccgataagcgctggtttgcgcttatcgggcagactgtcattactgggttgcgtttaccgccgccgtccaggcctgattaaacgcctgatgctgcgaggccaacggcccaatcagcgcattatattggctggcctgctgtgaggtcgggaactgaatgccgttcgcgacgaagctcacctgctcgccctgttgcgcaatataatcgcccacttgtaccaactgctgcgtaaagatctgcgccgccgggatcagcggctgcaaagcatctgccggcacggtgactacttttttgtagacctgatcaaacacaggtttcaggtcatcggcctgctttaacgcgccatgcgcggcatcagcctgcagttttgcattctgcaactgttgcgccagcacgcctaacgaaccatttgcctgccgcagcggctcgcgttgcgtcatataatcctgcggaacgcggatggcgttaacgctatcgaccaccgggcgcagaccggaatccatcgcctggtttacctgctgcgagtagccatacagtatcgcgtaatcagacacgaacggaccaaactgttttttctgatcggccgtcagcgttggtaaacgctctccgctacgcattgctgtattctgcaggaaatcgacaaacgctttgcgctgatcgccttctttatcaaaacacccgctcaggctaaacaccattaataacgccacaacaggcgcaaaccagcgagagcaggacttacctgtcgccattgttaatactcctttcacccaaaaatgcgcacaacgacacctgcgtgcctgacggcttacaaggatagtccaggtcaggcttgcaggataccctttccacgcgatcttgtagcggaaaattatgtttatctgcatcaatgcttaatttgttattttattgttaatttttgacctgacactgcgataaaaaacgcggcaagaaagctttccagcgggggatgtaatatttttttaatctttacaattattttctgaaagacggatataccttcctggatcaaattgttagcgtcctaaaagtcgcgtagcgtaaggcatcgaaacgaatcgatagcgcttcctggcggcgcgtcgccccccacccgcaagtttcccgactattcttaagaggcttcgatgcatttcacgatcccgctgtgtgatttacaggagttctcaatggaatataaagatccgatgtttgagctgctgagcagcctggaacaaattgtttttaaagatgaaacgcgaaagatcaccctgacgcaaaaacccaatccttttaccgaatttgaacagttacggagaggaacgggactaaaaacagatgaattcgccagagcgctgggcgtaacggttgccatggttcaggaatgggaatcgaaacgcgaaaaacccacgccagcagagcttaaattgatgcgcctgatacaggcgaacccacgcttaagtaagcaattgatggagtaatttttacccctttctgttttaacggtcctgcgcaaggaccgttttccccgcccgattactggcctggagaaataaagtaaaataaaagttgcatcgcccggcattacatgagttaatgtgctcaacggtttgacgtacagaccattaaagcagtttagtaaggcaagtcccttcaagagttatccattagatacccctcgtagtgcgcatttccttaacgcttaaaaaatctgtaaagcacgccataacgccgaaaggcacacttattttttaaaaggtaatacactatgtccggtaaaatgactggtatcgtaaaatggttcaacgctgataaaggcttcggctttattactcctgatgacggttctaaagacgtgttcgtacacttctccgctattcagaacgatggttacaaatctctggacgaaggtcagaaagtttccttcaccatcgaaagcggcgctaaaggcccggcagctggcaacgtaaccagcctgtaagcttaaaaagctcagaattttgaatccctgcctgatggcggggattttttttattccaattcccccctctcccccagcataactttgcattactttaccctgcgtccctttgacctttcccttaggggaacccctatagtaggcaaggagattgttcacaaggaattgaagttatgtcgaaatcatcatggttattacttttgggtttatgcgccagcggctccgcgcttgcggcatcctcagaatccgcttttctggcgcaacatgggctggcgggaaaaacggttgagcagatcgtggatacgattgatcagacgccgcagagccgtcctttgccttactccgcgtcgattaccagtaccgagctcaaattatctgacggagagcagatttatacgctgccgttaggcgacaaattctatctctcttttgcgccctatgaatggcggacacacccctgttttaaccacagcctttccggctgtcagggagaaatgccgaataaaccgttcactgtaaaagtgacagacagtaaaggcgctgtcatcgtacaaaaagagatgcaaagctatcgaaacggatttatcggtgtttggctaccgcgcaatatggaagggacgctggaagtaagctacaacggtaaaacggcgtcacatgccattgccaccaaagatgacagccagacctgtctgacggaattaccattacgttaaaaaatgcccgataacataatgggttatcgggcctataaaacgccaacaagataaaattaacagagtgccttgagaatgcataacgccacaagaatggcggaggtgggctcactttgtactgaccccaaaaacctggacagattaaccgaggcatcagcgaaagagtccatttaatacatgggctcttttttgtttctggctataactaaataacattgtccgcaatcgaattatccattccgttgctttcttgcatcacgcggattcctgtctcatcaatattttgttcgtcgtattcttcctgaatttaaccttagacgttctatcaaattatcgcttatagcgatttgaacataacagtctttgcattctattgagggagcctaaggaacaatgttcgctgctgagtttgtgatgatttgaaaccatggtgaatgtagaaatttttggcttcttcggtaagtgcatgaaccatgattgcacgtacaccaatattctcggcaacccgatagcaacgaagcactgcatcatgaagtaaatcagcaccaagcccttttccatggaatgagagatcgacagcaagacgggcaagtataatgacagggatgggatctggcatgttacgccgaaggttgcctgtcacttctgtatggttgacgctaccggtggccagagagtaaaaaccggctacttgcttcgtgtctttcttgcacaccacaaatgttctggccgctccgagagcctggtttttgaggcccttttgcttcaaccagtcatcgagcacagcttcaccgctgacgaactcagctacctgatgaaaagcggacaaaggttctggtgctgttacacgtcccactgaggtttccttgccagcagtttttcgataacgggatcatctgcgactggtgcatcaagcagattgatgaactcctcatattgctcatcgttaaagttaaatacacggcggtcaaggatcactttctcggcagcctggcaggccgtttccagaatgaaatctgtacgtgacttgtgaaggatttccgcagctgcatcaatgagcgcccgctgcgattccttagctctaaggttaagttgaacatctgatttcatgagacaccccttgtatagcatttgctttacaagaatagcacaaccaccatgtatagcaaacggtatacatcaagtcgtcgtttttcattttttgaatactgatgttcgctttgtgccagaagcggaaattgctcattgtagcggtttactgagttcaacaaggcaaaagaacaatgctgcctttctgcaggctgactattatttcgccaaacatttcctcatcagagcattttgtaatgtcactccacggcaaataggaaagcctcgctccactatatgaaagccgtgtcgtagaaagaacacttccgcagccttacttacatttgaagtaagttcactaattccacgctgtctggcttcctcatgaatgcaattcatcagtagtgtccctaccccctgtcttgaataggttcctgatacaaagaaatgatcaatgtatccatttggttgaacatctgcatatccagctatttcaccatccagctctacaacaaaaggttgtaattccttaatgtgattggcccatcgctccaggtcgatatctgctggggcccaggcatcaatttgttcacgtgtgtagtagtgtgatgcgatcgtatgtacagatgagaaaaaaactctgaataacgatatttcatccccattactgaaccttctgattttcataaaacctcattgtgagagttacttgtagaacaatactaatttttgtgaaatagggcgtccgttcctcgctcatagcagacatttgcgtgaccgtatccaccaacgttcaggtttcctgatagcatccctgtacagaccttgttaatttctgcctggatagctctttaggcgctattcaaccgggctgagtccgttaaatttaaggctaattcgtcgagtattgtagtatcgtatgtaatcctcaatagctatcttaagttcatcaatatccttaaatttactggtgtaaaaactttctgattttaaagtcccgaaaaaacattctgcacaggcattatcaaggcagttgcctttgcgggacatactttggatgatgccaaactctcgtaactgatactggtaccatcaatgacggtattgccagccctgatctgaatgaagaaccggattggtacccgcatcaagtctggcaaatgccttcatgagcatgtcatcgatcatcggcatagttggacgttctgaaatactgcaggagatcgcttcgttattgaagagatcaataatgggcgcagtgcacttttgatttatatacccttcatacttcaagttgcttatgtgttggctacgctcgctcaccccagtcacatagttatctatgctcctggggactcactcccttgccgcctttaagcaactcgaattattttgggtatagtcaggtggggattttctctgtctgccttttggtgaatacctgagacaaacagtctcaagcacccgcagctattctaacgccaatatccgtaccgccagcgttaatgtattcctgaaataattcttgccaatcaatagagataaccgcgtctatgagttacagaattattagcgaatcaactaatactatttatgttataaaaaaacctgcccgagagcaggtttttgtttatttaactgaacgcttattgcagtaacgaaatatccgcaacctgcaggaacagttcgcgtagtttcgacaacagcgtcaggcggttgatacggatatctttctcttccgcgttaaccatgacattttcgaagaattcatccaccggagcgcgcagagcagccagctcaatcaacgcttcctgataacgaccatcggcaaagtacggctgaagcttatcacgcagcacaaccagatgtctggccaactcaatttccgccgcttctttcagtacggaggcgtggacgatatcgttcagcggctcagtggctttcgccaggatgttggagacgcgcttgttcgccgccgccagcgcagaggcttcttccagggtgcggaaatgagacaccgccttcatgcgggcatcaaaatctgccggacgggtcggacgacgcgccagtaccgcctggatagtgtcgacggtgtaaccttcatcctgataccaggcgcggaagcgacccagcataaaatcgatcacatcatcgactacgttggcattggtcagcttgtcgccatacagacgcaccgcttcttcggtcagcgtttgcagatcaagagcgaggttcttctcaacgatgatgcgcagcacgcccagcgcggcacgacgcagcgcaaacgggtctttgtcgcctttcggatgctgaccaataccgaagatacccgccagagtatccatcttatcggcgatcgccagcgcgcaggccaccgggttagacggcaggtcatcaccggcaaagcgtggctgatactgttcgttcagcgccacggccacatcttccgcttcaccatcatggcgcgcgtagtgcatccccatcacgccctgggtgtcggtgaactcgaagaccatgttggtcatcaggtcgcacttggagagcaggcccgcacgagtggcgtggttgacgtcagcgccaatctgaccggcaatccagcccgccagcgcctgaatacggtcggtcttgtcgcgcagcgtgcccagctgttgctggaacagcacggtttgtagacgcggcagatggtcttccagacgttttttacggtcggtattgaagaagaattcagcatctgccagacgcggacgcaccactttctcgttaccggagataatctgggtcggatctttcgactcgatgttggcgacgaagataaagttcggcagcagcttgcccgcgttgtcataaaccgggaaatacttctggtcgcccttcatggtgtacaccagcgcttcggcaggcacggagaggaatttctcttcgaatttcgccgtcaataccaccggccattccaccagcgaagctacttcttccagcaggctttcgctcaggtcggcattaccgccaatcttacgtgctgcttcttcagcgtccgctttgattttggctttacgcgcttcgtagtcggcaatgactttaccgcgctccagcagaatttgcgggtactggtcagcattgtcgatagtgaactccggctcacccataaagcggtggccgcgaatgacgcggtcagactgaatacccagaatagtcgccggaatgaccttatcgcccaacagcagggtcacggtgtgcaccggacgcacgaagtgtacgtcagacgcgccccagcgcatcagtttcgggatcggtagtttcgccagcgaggtggctaccatgttcggcaccagcgcttcggtactttcgcccttcacgtgggcacgatacagcagccattcgcctttgtcggtcttcagacgctcggcctgatcaacggtgatcccgcagccgcgcgcccagccttctgccgctttgctcggtttgccttcggcgtcaaacgcctgagcaatcgccggaccacgtttttcgacttcgcgatcgggctgagattcagcaagattcgccactttcagcgccagacggcgcggggcggcaaaccattcaacgttaccgtgcgcgaggccggcgttatccagctccgcagtgaagttcgcagcaaaggactcagccaaactgcgcagtgcttttggtggcagctcttcagtgccgatttccaccagaaaagttttctcagacatggccgcctcttacttgtctttgttgcacatcgggaagccgagggcttcacgggaagcataataagcctctgccactgctttggtcagggtgcgaatacgcaaaatgtagcgctgacgttcggtgacggagatagctttacgcgcatccagcaggttgaagctatgggcggctttcagaatacgctcgtaggccggcagcggcagcgggttttccagcgccagcagctgctgggcttctttttcatactgctcgaagcaggtgaataagaaatccacatcggcgtattcaaagttataggtggattgctccacttcgttttgatggaacacgtcgccgtaggtggttttacccagcgggccatcgctccagaccaggtcgtaaacgctgtccacgccctggatatacatcgccagacgttccagaccgtaggtgatttcaccggtcaccggcttgcactccaggccgccgacctgctggaagtaggtgaactgcgtcacttccatgccattcagccacacttcccagccgagtccccaggcgcccagcgtcgggttttcccagttatcttccacgaaacggatgtcgtgaatggtcgggtccatacccagctctttcagagaaccgaggtacagctcctgaatgttgtccggagacggcttaatcactacctggaactgatagtagtgctgtaagcggttcgggttttcgccgtagcggccatcggtcggacgacgagaaggctgcacataggcagtcgccatcggctctggccccagcgcgcgcaggcaggtcattggatgagaagttcccgcgccgacttccatgtccaatggttgaacaatggtgcagccctggcgagcccagtaatcctgtaaggtcaggatcaagccctggaaggtcctggtatcaaacttttgcatattatttcgtgctggatacgtgtggatttaaaggaaggagccagtatacccgctggatgcgagatatacagtatgaaaccggtttgtttagcgaaaattgccggatttcgcggcatcacacctcaccaggcgcggcttttaccgcatagaaagatgtaaaaactgcccatctgcatcaaaagagcagacaaaactctctttacggaaggtattaccccgcatctcatagctcccctgaaactgttcgaaaccggtaacagcaattttctgtgcgccagtattgtaacgctgcgccgcctgagctttacacaatgcttccatatccagcgtgcgtgttgggctcactttactctgctgggctttttgcgtcggtggcggtgtcgcagtgcatcccaccagagcgatggctatcatcacagtacagaaatacttcattatcatttttattaccgtctggtttgctggtcagtcttattattaaggtttgtgggtaacagaaacattgtgcgaatctccttacgccatcacaagatgtagcgtagaaagtcggatttttccagtgagccaccgcgctggaactctattcaaacggaagctgaggaactgatgcagcctaaaattaactggattgataacctgcgagggatcgcctgtttaatggtagtgatgatccatactacaacgtggtacatcaccaacgcccacagcgtcagcccgctaaactgggatattgcgaatgtcctgaattcggcttcgcgcgttagcgttcccctgttttttatgatttcaggctatcttttttttggcgagcgctgcgcgcaaccgcggcattttttacgtatcgccctgtgccttatcttttacagcgttgtcgccctggcttacatttcactttttacttcgatcaacgtcgagctttcgctaaaaaatgtgctgcaaaaacccgtgttttaccacctgtggtttttctttgcgattgcggtgatctacctggtatcgccattaatccaggtaaaaaacgtgagcggcaaaatgctcctgatgctgatggtgatcattggtattattgctaacccaaatactgtgccgcaaaaaatcggcggcgttgaatggttgcccatcaatctgtatatcagcggcgacacgttctactacattctctacggtatcctgggccgcgccattggcatgatggagacgcaaaagccatcgctgacgcttatctgcgctgccctgttcatcatcgcggtatttgttatttctcgcggcacattgcatgaattacgctggcgcggaaattttgccgatacctggtatctgtattgcggtcccatggtgtttatttgcgccgtctcactgttcacggtagttaaaaataagctgaatgcgcggacgttacctggactagggcttatctcccgccactcgttgggcatttatggtttccacgcactgattatccatgcgctacgtactaatggtctggagttaaaacgttggccgccgttagatatcgtgtgggtttttgccgcgacggtgacaggaagcctgctactttccatgctgttacagcgtattgataaacggaaatgggttagctaaacgacaatgatggctccggccatcattcatcatcactgtaggaagcgtaaagatcggttccatatatactgacccccagcgccaccagacacagtattttcagcgcgcccgccagcgccaggttaaatacgccgaccgcgaccatgccgatgccaagcaacagcaaagatttgcaacgagaaagcaagcggccatttcccgtgtgttcctggcgaattaagactggaaaaccacacatgacgattgccgcaaaaaaatatcccttttcgcttaatgtatgacagcctggccacagtcccaccaggtataccactgcaccgacaactaacattcccaggccgaatatccgtttcctgcgcgcaacgtgatcgtccatctcactctccttgtggttgtgtgagacacattaagcgaagaaatagcgatgaaaaaggcgcctgcccagcaataatataaaaatcagaaaacacacatacttacttcgatataattcaatagaattaatatttacgggaaatgcctttcggccaaaaccgaaaggcattctgacttatgacatcaacggcaacagctgctgataaagtcgacggaaggtttcacgacgttgttgataaaccgcatgatgctgcgcatcaggataatgcgcctgctccagcggcaactgcggcaatacatcggcgagcggagtctgtttattcaccgcaatttgcgccagacgcgccgcgcccagcgctggccctacatcgccgccagtacgataatcaagctgtagcccgctaatatcagatagcatctgacgccagtattcgctgcgcgccccgccgccgataagcgtcacgctggcgggtttgacgccgcaggcgtgaaccacatccataccgtccgccagagcatatcccacgccctccagtaccgcccgcgccagttccgccgggccatgctgatgggttaaaccaaagaaaacgccttttgcctgcggattattgtgcggcgtgcgctcgccggacaggtacggcaaaaaccagatcgaatcggcatgctcatccgcctgctgtgcggcggcaatcagcgccgggacgttctcctgcccggtgagtttagccgcccagtccagacaagaggcggcgctcaacatcacagacattaaatgccagcgttccggcagcgcatggcaaaaactgtgtactgcgctctccggtttactcagaaagccgtcgctgacggcaaaatagacgcccgatgttccgagcgagagcatcgcctgtccggcatcgatcattcctacgccgaccgcgcctgccgcattgtcgccgccgcccgccaccacgggtactgttggcattccccatgcgctggctacctccggcagcaacgttccggtaatgtcactaccttcaaataacgctggcatctgctgtcgggttaaatgacaggcgttgagcataacgtcgctccagtcgcgctttttcacgtccagccacatcgttcccgccgcatccgacatatcgctggcaaagacgcctgtcattcgcagccgcagaaaatctttcggcagcagaaccttgtctatctggtagaaaatatccggttcgtggcgctgcacccagactaatttgggcgcggtaaaaccgggcatcatcagattaccggttatcgcacgcgactgcggcacctgtttttccagccaggcgcactcttcgctacagcgtccgtcattccataaaatcgctggtcgcagaacctgctgacggctatcaagcaatgtcgcgccatgcatttgtccggcgatgcccaacgcccgaacgccacttaacgactgttgccgacctaaacctttaaccgcacgatccgtcgcctgccaccactgctctggttcctgttccgaccataagggatgcggacgcgatacggtcagtttttcagtatgcgtagccagcacatcgccctgctcattcaacaggatagcttttacacccgatgtaccaagatcgatcccgatatacatattgtgggttcctttactgaaagcgcccggcagcgctacgcttaccgggctaatcacgactacaggccgggctaacgcggagtcgcccggtagatagggttatttatcaaacagataacggttaaccagattttctaacagctcctgatgaccgctttgatgtactggcgccagattatgctgctccgcatactgcgccagttcgcctaaggagagttgtcctttcagaatctgctgacccagctcgctattccagccggcatagcgcttcgccacgcgtttatccagctcgccgtcttcaaccatacgcgcggcgattttcagcgacaacgccatcgtatccatcgcgccgatatgaccgtagaacagatcgtatttatcggtgctctggcgacgaactttggcgtcgaagttgagaccgcccgtcgtgaatccgcccgctttcaggatttcgtacatcaccagcgcgttctcttcaacgctaatcgggaactgatcggtatcccagcccagttgcgcatcgccgcggttggcgtcaacggagccaaaaatacccagcgcgatagcggtcgcgatttcatggtggaacgaatggcccgccagcgtcgcgtggttcgcctcaatgttcactttgatctctttttccaggccgaactgtttgaggaagccatagaccgttgcaacgtcataatcatactgatgttttgtcggttcctgcggtttcggttcaatcagcagcgtgccctggaagcccattttatgtttgtgctcgaccaccatttgcataaagcggccaatctgttcgcgttcctggcgcagatcggtattcagcaacgtttcataaccttcgcgcccgccccacaggacgtaattttcgccgcccagtttatgcgtggcgttcattgccgtaaccacttgcgtcgctgcccagctaaagacttccgggtccgggttagtggcggcgcctgcgccatagcgcgggttggtaaagcagttcgccgttccccacagcagttttacgccgctctgctcctgtttcgccgccagcacatccaccatctgcgcgaagttgtttttatattctttcaacgacgcgccttccggcgacacatccacgtcatggaagcaataaaaaggcacattcagtttgtggaaaaattcaaacgccacgtccgctttgcgtttcgccagctccagcgcttcgcccggttgctgccacggacgattaaacgcgcctacaccaaacatatccgcgccgttccagcagaaggtatgccagtaacaggccgcgaaacgcaggtgatcttccatacgtttacctaaaaccagctcgtcgggattgtaatgacgaaatgccagcgggttagtcgattgagggccttcatagcgaacacgatcgagttggtcaaaataagcctgcatagtgagctccataatcagataagacggcaagtaaacgacataacgtcatactggaatttcctgatttattgctcaattacgttatttcacaccgctattaagagaatccccaaatgtgctctggctctcaaaaaaacgctgaaaaccacagaagaaaaaagcgatcgcgatcgaatcctggcaaataaacaaaaaaccgtaatatatagataagaaatgacaattgtcatccgccgtttgctgtgatgaatttcgcataacgtttcaggcgcaaaataatttgtcatcattcgccagaccgttatgtcagccgttttgatagtatccatgagtccaggttcacttttgcaggatatatcctcatgtttgataaacgtcaccgtatcactctgttatttaacgcgaataaagcctatgaccgtcaggtagtggagggggtgggtgaatatttacaagcctcgcaatccgaatgggatatatttattgaggaagatttccgtgcccgtatcgataacattaaagagtggttaggcgacggcgttattgccgattacgatgatgacgatatcgcgcaattattggccgatgtcgacgtacccattgtcggggtcggcggttcttaccatcttgctgaaaattatcccgccgttcattacatcgccaccgataatcatgcgctcgttgaaagcgctttcctgcatttaaaagaaaaaggcgttaaccgcttcgcgttttacggtttgcccgactccagccgcaaacattgggcggcggaacgggaatacgcctttcgccagctggtcgccgaggaaaaataccgcggcgtagtctatcaggggctggaaaccgcgccggaaaactggcagcacgcgcaaaatcgcctcgccgactggcttcagacgctgccgccgcaaaccggcatcattgccgtaacggatgcccgcgcccgtcacgtattgcaggcctgtgaacacctgcatattccggtgccggaaaaactttgcgttatcggtattgataacgaagagttaacccgttatctgtcgcgcgtcgcgctttcctccgtcgcgcagggggcgcggcaaatgggctatcaggcggcgaagctgctgcaccgtttgctggcgcgcgaagagatgccgttacagcgcattctggtgccgccggtgcgcgtcattgcgcgccgctcgacagactatcgctccctgaccgatccggcggttatccaggcgatgcactttattcgtaaccatgcctgtaagggcattaaagtcgagcaagtgctggacgcggttgggatttcacgttcaaacctggaaaaacgttttaaggaagaagttggcgagacgatacatgcgctgatccacgccgaaaagctggaaaaagcgcgtagtttgttgatttccaccacgttggcgataaacgaaatttcgcaaatgtgcggctacccgtcactgcaatatttctattcggtgtttaaaaaggagtacgtcactacgcctaaggagtatcgcgaccagcatagtgaagcgttgttgtagtttatccagcctacagacgccttgtaagccggatagcgtagcgccatccggcacacagaattacatatgcgcggcgatcagacgctggttgtcctggtacatcgcgaacaagtagttgttatagcgcgacccctgggtagagtaacccttcagcttatgaatcatcgccgtggcggtgacttcctgatccgccttacgcagttgggcgcgcgacttgcggaaagaggaataagccggatgcgtgttcaggttagcgacatacgcgctcaccgactcctcaaccgacgcgaattgcgagtaacctttcaccttacccggcgtattggtacaacgccctttcgtgcacttcatgccgaacaggttattgttgctacgcgccagtttagaggttccccagccgctttccgccgccgccatcgtcgccaccatgctggttgggataatgtcgacgcgctccagcaacgtattccacggaatacgacgcgtgttgccggaccagctcactttatagcgcttcgcgatatctttcatacgcgcgcgttcagacggcgaccagcggttctggtactgttttgagatcagccaattacggtccgcggtaatcgcggcattttggctggtgatgtaaggcataacggtccggagaaacgctttttttctgggggttccggaagggtattttcgcaaatcaggaagtgaactgctctttgcactattgcgagaatactcttgtttactgctaacctgtttataacttgtctcagttatgtgggacttttgactcgtttgtgttgcgtgcgtctttgccagcacctcacccgaaaatgcgatggtgagtaacataagaatcattgccccatatcgtcgcatgggagtcaatatcattaggtctcctggtcggattgatacattccaacaccttttatttttcacgaagttgaggtttgaaccccaaattctagcaaaaataggcttaaaaagcacctcagggaatagtcttaatccgaaactatgtcaactattaacgataacaggcagcaataatgccaataaaatgtggtgcttatcgcaaatagaggcgtttttttgcgcctcgtcgctcaccctcgcgcctcctcctgcgcgactctctgctgaggaggagttcattcgcctaaaaaccaggcaagctgatgaatattgcccacaaaggatagcgtgatgaaacttgccgccttcgctctgacgctgatacccggtatcgcgatcgcctcatcatggacctcacccggttttccgacgttctcgacgcaggaaaccgggcgctttaccagccatgctgcattaacaaaaggtacacgcgcgttaacgctccatattgaccagcagtgctggcagccctccggcgccataaaactcaaccaaatgttgtcgttaaaaccctgcgaaggcgcgccaccgcaatggcgtttgtttaaagatggcgactatacgataacggtagatacccgctccggtacgccgaccctgttgttatcgataaaaactgaacctgagcgcaccgcgcagctcgcctaccagtgtcccgtctgggatggttcgccgctcacgctggatgttcgccagacctttccggaagggacggtagtgcgcgattattacagtggtcaaaccgataccgtccaaaacgggcaaatcacgctgcaacctgccgacagccacgggcttttattgctggaacgcgcggaaacccatgcgtcagcgccttttaactggcgcaacgccaccgtttattttgtgcttacggatcgctttcgcaatggcgatccaaccaatgaccacagctatggtcgccataaggatggtatgcaagagattggcactttccacggcggcgatttgcgtgggttgacgagtaaactggactatctacagcaattaggcgtgaacgccttgtggataagctcgccgtttgaacagatccacggctgggtcggcggcggagcaaaaggcgattttcctcattacgcctatcacggctattacactcaggactggacgacgctggatgccaatatgggcaacgaagccgatctccgcgcgctggtcgacggcgcgcaccagcgcggcatccgtattttatttgacgtagtaatgaatcatgccggttacgctacgctggaggatatgcaggagtatcagtttggcgcgctctatttatccggcgcggaacggcaaaaaattctcggcgatcgctggacaaactggcgacccgccgccggacaaagctggcacagctttaacgactacatcaacttcagcgacagcgccgcctgggaaaaatggtgggggaaaaagtggattcgtaccgatattggcgactacgacagtccgggatttgacgatttaaccctgtcgctggccttcctgccggatataaaaacggaatctaccacgccttccggtctacccgcgttctatgccaacaaacccgatactaaagcaaagttcattgaaggctatacgccacgggattatctgactcactggttaagccagtgggtgcatgattacggcattgacgggttccgggtcgatactgccaaaaacgttgagcttcctgcctggcaacagctaaaaacccaggccagcgcggcgttacatgaatggaagcaggccaatccggacaaagcgctggatgatagcccgttctggatgactggcgaagcgtggggccacggcgtcatgaaaagtgattattatcgctatggtttcgacgcgatgatcaattttgattatcaggagcaggcggcgaaagcggtcgattgcctggcggaaatggggccagtctggcagcagatggcggataaaatgcaggatttcaacgtattaagttacctctcctcgcatgatacgcgccttttccgtgagggcggtgataaggcggcggaactgctgctgctttcgccaggcgcggtgcagatcttttacggcgatgaatccgctcgtcccttcggccccaccggctccgacccgctgcaaggcacccgttcagatatgaactggcaggacgtgagcggaaagtcagccgcagccgtcgcgcactggcagcgtattagccagttccgcgccagacatcccgccatcggcgcaggccaacaaaccacgctgacgctaaaacacgggtacggttttgtacgccagtacggcgacgatacggtgatggtcgtctgggcgggccgccgctaatcgtggcgctaccggtctcctcgcgtaccggtagccccttcaaaataaaaaactaacctgataaaaatttgtagcataaaacatcaatactaccgcctgacccccatttgcgccccgccatttgtagcgttatggttatccactttgacagacagttcgatagatcacccgttatgacattttcacttttcggcgataaatttacccgccattcaggcattacccgcctgatggaggatctcaacgacggcttacgcacgccaggcgccatcatgcttggcggcggtaacccggcacacatccctgcaatgcaggattatttccagacgctactgacagatatggtagaaagcggcaaagccgctgatgcgctttgtaattatgacggtccccagggaaaaacggcgctactgaatgcactggccgtactgctacgtgaaacgctgggatgggatatcgaaccacagaatattgcgctgacaaatggcagtcagagcgcgtttttctacttatttaatctcttcgccggacgtcgcgccgacggcagtacgaaaaaggtactattcccgcttgcgccggaatacatcggctatgcagattccggtctggaagacgacctcttcgtttcggcgcgcccgaatattgagctgctgccggaaggccagtttaagtatcacgtcgattttgagcatctgcacatcggcgaagaaacggggatgatttgcgtctcgcgcccgaccaacccaaccggtaacgttatcaccgacgaagagctgatgaagctggacagactggcgaatcagcacaacatcccactggtgattgataacgcttacggtgtaccgtttccgggcattatctttagcgaggcgcgcccgctgtggaaccccaatattatcctatgcatgagcctctcgaagctggggctgcccggttcccgctgcgggattatcatcgccaatgataagacgattaccgccattgccaacatgaacggcatcatcagccttgcgcccgggggcatgggcccggcgatgatgtgcgaaatgattaagcgtaacgatctgctgcggctgtcggaaacggttatcaaacctttctactatcagcgcgttcaacagacgatcgcgatcattcgtcgctatttatccgaagaacgctgcctgattcataaaccggaaggcgcaatatttttgtggctgtggtttaaagatctgccgattaccaccgagctactctatcaacgcttgaaagcgcgcggcgtgctgatggtgccaggccactatttctttcccggactggataaaccctggccgcacacacaccagtgtatgcggatgaactacgtgcctgaaccggacaaaatcgaggcgggcgtaaaaattctggcagaagagattgaacgcgcctggcgtgaaggctgacggttattccggtcatcatgcaggccggaacgacgttcagaaaggttgagaatagaggcgctggcgctgcacatttgttgcgtcaacgcactgtaacgcactggtcgggcaggcttccacgcacgccggccccgcttcccgatgccagcaaagatcgcatttaatcgcctgcgcgcctgacgcggacgccaccacagtcatcgcgccaaacgggcaagccagcatacagcttttacaaccaatgcagcgcgatgacgtcacgaagatatgcccccgatcacggcgaatcgcctgtaccgggcagacattcgcgcacggcgcgtcctcacactgatggcagaccgtggccgtggtgaagctatcctcttttatcacccggatacgcggcacaaagtccgccgtcgtcaccgccgcgctattctgctgttcctggtgcgacaccacgcaggcgacctcgcaggtacgacacccgatacacgccgacgcatccgccataataaaccggttcattgttctccccctgcgttaaaacgccagaatgccagagagccattccccgccgctttgatcccactacgcaaacggacaaattttgtcagatgcctgataaaacctggcgagctgtcttattcgcgaacggtaaatcccagctcattagagatagcctgtgcggtttcacgcaacggtttgagcagatttttctcgccgatctgttttagccgtgacgtcgacagtgaaatagaaatggcgtaaggcactcgatggtgaatatcaaacacaggcacagcaatacaggaaacgcctagttcattttcttcgcgatccatcgccatgctggtttcacgaatttgcgccagctcatcgtacattgctggtaaatcggtaatggtattacgagtcagcggctggatctgatctttatggctttcccagtaagacgccacataatccggctgaccaaacgccatataaattttccccatcgccgagcagtacagcggcatatgctggccaatgtaggcacgcgtgcgcagcataccggtggtcggttccagcttataaatcaggatagcgtggtcatcttcacggctggaaaaattcaccgtctcgccggtggccaggttgagcgcctcaaggtgcggtgccgcaacgtggatgatattcagcgatgacagggctttttggccgacggcaataaactttgtcgtcagacggtagcttccggccgccggcgctggcgtcacgtatccgcaggattgaagcccctgcaacaaacgatggacggtactcttgttcaaccccgccagctccgacaggtgcgccagtgggcaaccgttcgggtagttactcaaaatttctatcaacatcaggccacgaaacaggctctgactccccgcaggcttctctttatcgttgttctggctcatcagaaaactctctcctttcttgggcgatcagatggtagctcaaagtgtgttgcagttcacgatatcagcataaaaaacataacccgatgattttaatcttttttaaaaagcttctctggcgttgccatgtcaatttttgatctatatatttggaactacatttcgcattatgaaatttatcgacaaaaaaacatactaaaatttctaacaatcgaccaggagaacagggatgaaagtaactttcgaagagttaaaaggggccttctaccgcgtcttgcggtcgcggaatattgcggaagataccgccgacgcctgcgcggaaatgttcgctcgcaccaccgagtccggtgtctattcccacggcgtgaaccgctttccccgcttcatccagcaactggataacggcgacattattcctgatgctaaaccgcagcgagttaccagcctcggcgccatcgaacagtgggatgctcagcgcgctatcggcaacctgacggcgaaaaagatgatggaccgggccatcgagctggcttccgatcatggtattggcctggtggcgttacgtaatgctaaccactggatgcgcggcggcagctacggctggcaggcggcggaaaaaggctatatcggcatttgctggaccaactccatcgccgtcatgccgccgtggggggcgaaagagtgccgtatcggtaccaatccgctgatcgtcgctatcccttccacgccgatcacgatggtggatatgtcgatgtcgatgttctcctacggaatgttagaagttaaccgtctggcgggccgcgaactgccggtggatggcggtttcgacgataacggtcagttgaccaaagaaccgggcgttatcgagaaaaatcgccgcattttaccaatgggttactggaaaggatctggtctgtcgattgtgctggacatgattgccaccctgctttccaacggctcttccgttgccgaagtgacccaggaaaacagcgatgagtatggcgtctcacagattttcatcgccatagaagtggataagctgatcgatggcgcaacccgcgatgccaaactgcagcggattatggatttcatcaccactgctgaacgcgccgacgacaacgtcgcgattcggctgcccggccacgaatttaccaaattgctggatgacaaccgccgtcacggtatcaccattgacgacagcgtctgggccaaaattcaggcgctgtaaggagccacatcatgatttttggacatattgcgcagcctaatccgtgccggctaccgtcggccatagagcaggcgctcgatttcctgcgcaatacggactttcgcacgctggaacctggcgtagtggaaatcgacggcaaaaatatcttcgcgcagattatcgatatgaccacccgcgatgctgctgaaaatcgtccggaagtccatcgccgctatctggatattcagtttctggcatggggcgaagagacaattggggttgccattgataccggtaataatcaaatcagcgagtcattattagaacagcgcgatattattttttatcacgacagtgaacatgaatcattcattgaaatgataccgggaagttatgccctgtttttcccgcaggatgttcatcgtcccggttgtaataaaagcattgctacgccgatacggaaaatagtcgtaaaagtcgccatagacgttttataaaatagagtttactggagcacaaaatgaaaaataataccggttatattatcggtgcgtacccttgtgcaccctcatttcaccagaagagtgaagaggaagagacggaattctggcggcaactctctgatactccggatatccgggggctggagcagccttgtcttgaacatcttcacccgctcggcgacgagtggttattgcgccatacaccagggaactggcaaatcgtggtcaccgcgataatggaaaccatgcgccgccgtagcgaaaacggcggttttggattagcgtccagtgacgaggaacagcgtaaagcctgcgtggagtactatcgtcatctgcatcagaagatcaataaaatcaatgggaacaataccggcaaagtcatagcccttgagcttcatgccgccccgctggggggcaatccgaacgtggcgcaggcaaccgacgcctttgcgcgctcattaaaagagattgccaactgggactggtcctgcgacctggtgcttgaacactgcgacgcgatgaccggccccgcaccgcgcaaaggattcttaccgttagtaaacgtactggaaactattgccgactatgacataagcgtctgcattaactgggcgcgctcggctattgaagggcgggatacctctctaccgctgatccatacgcagcaggccaaacaggctggaaaactcggggcgctgatgttctccggtacaacgctggatggagaatacggcgaatggcaggacctccatgctccgtttgcacctttctgtccacaaagcctgatgacggagaaacatgttcaagaactcattaccgccgccgctcccgaactgttgcagtttaccggtattaaattgttggaaatcaatgccagtgccgatattaatcaccgcataaatatattacgcgatggtattaacataatgaaaaaggccacacgccgctaacctgaattaaacatcatcaccttaattctcggcctgcaactcaacgttgcgccgacctaatataaaccaaacataagaaattaagttccactattcagcatcgaaagagataagtttctataacctgatggagtcgttatgaagcgggtacttgagggcatacttgcggtattaattgccgtactttcctgcattgtatttattaacgttattttacgttacggttttgagagcagtattttgtcggtagatgaactatcacgttatctatttgtatggctgacgtttattggcgccatcgttgcatttatggataacgctcacgttcaggtcacttttgtggtggaaaaactttcgccagcgaatcagcgtcgactctcgctgctgacacattcgctgattttattgttatgcctcgcattaggctggggcagcctgcaaaaagcgttgcaggactggagcgatcactcgccaatcctcggtttaccgatcggcctgatgtatatcgcctgtctgcccacaagcgttgccatcgcgttaatcgagctgcgtcggctttatcacttaataacgcgtaacgattcctttcaacaaccacagcaaggagcctaatcatggccgtggtgatatttctctgctgcctgctcggcgggatcgcgataggtttacccatcgcctggtcgctgctgctttgcggcgctgctctgatggcatacctggatatgtttgacgtgcagattatggcgcaaaccctggttaacggcgcggacagtttctccctgctggctattcccttttttgttttggccggtgaaatcatgaacgcgggcggcctgtcaaagcgaattgtcgacctgccgatgaagctggtcggccataaacccggcggcctgggctacgtgggcgttattgcggcaatgattatggccagcctttccggctctgcggtagcagataccgctgcggtcgccgcgctgctggtgccgatgatgcgctccgcaaactacccgatcaaccgctccgttgggttaatcgcttccggcgggatcattgcgccaattattccaccctcgattccttttattatcttcggcgtttccagcggcttgtcgatcagcaagctgtttatggccgggatcgcaccgggcatcatgatgggcgcggcgcttatgctcacctggtggtggcaggccgggcgattaaatctcccttctcagcctaaagcaacaccgcgtgaaatctggcaatcattggtttcaggtatctgggcgctgtttttaccggtgattattatcggcggcttccgttccggacttttcacgccaacggaggcaggggcggttgccgcgttttacgccctctttgtcgccgttgttatctatcgggaattaacgttttccagtctctaccacgtgctggtcaatgccgccaaaacgacgtcagtcgtcatgtttctggtggccgcggcccaggtatccgcctggctgattacgatcgcggaattacccatgatggtgtcagatttgctgcagccgctggtcgactctccgcgactcttatttatcgtcattatgatctcaattatggtcgtcggtatggtgatggatttaacgccaacggtgttaattcttacccctgtattattgccattagttaaagaagccaatattgacccgatttatttcggcgtcatgttcattattaactgctctattggattaatcacaccgcccgttggcaacgtcctcaacgttatttccggggtagcaaaattgaaatttgatgacgcggtaagaggcgtattcccttacgttgtcgtactgatgtcgctgctggttttatttatttttattcccgagctaattatcacaccgcttaaatggattaattaaaggataatattatgaaattacacgttattgctcgttcattattgatagctggtctgacggttttcagcgtgtcgtctctggcggcgcaatctttacgttttggttatgaaacaccgcaaactgactcccaacatattgccgcgaaaaaatttcacgaattattaaaagaaaaaactaacggcgaattaacgctaaaactctttcctgacagcacattaggtaacgcccaggcaatgatcagcggggtgcgcggcggaactattgatatggaaatgtccggttcgaacaatttcaccggcctggcccctgtattcaacttacttgatgtccccttcctgtttcgcgataccgcgcatgcgcataaaacgctcgacggcaaagtcggcgatgaactgaaaaaatcactcgattcaaaagggttaaaagtgctggcctactgggaaaacggctggcgcgacgtcaccaactcccgcgcgccggtaaaaacgccgggcgatttgaaaggcttaaaaatccgcactaacaacagcccaatgaatatcgcggcctttaaaatcttcggcgcgaaccctattccgatgccgttctccgaagtctataccggcctcgaaacccgtacgattgatgcccaggaacaccctatcaacgtcgtgtggtcagcgaaattctatgaggtacagaaatacctctccctcactcatcacgcctattcgcctctgctgctggtgatcaataaagccaaattcgacgctttaagcccgcagttccaggaggcactgctgagttccgccaaagaagcgggtgactatcagcgcaaactggtcgccgaagatcagcaaaaaattatcgatggcatgaaagaagccggagttgaagtcctgaccgatatcgaccgtaaagccttcagcgatgcgctgggcagccaggtgcgcgatatgttcctgaaagacaacccgcagggcgccgatctcctgaaagccgtggacgaggtgcaataagtcatgagcaactactggctggggttagattgtggtgggagttggctaaaagccgggttgtacgatggcgcaggccgggaagtagcggtgcaacgcctgccgctgcacgctttaagcccgcagccaggctgggttgaacgcgatatgaccgaactgtggcaacagtgcggctcggtcatcagcaaactgctgacgcacacgggggtgagcggctcacaaatccgcggtctgggtatttccgctcagggtaagggcctgttcctgttagataaaagcgatcggccattaggtaaagcgatactctcttccgaccgtcgcgccatggaaattgtccagcgctggcaaaaagaagcggttccgcaaaaactctacccgctgactcggcaaaccctgtggaccgggcatccggtctcccttttacgctgggtaaaagagaatgagccgcagcgctacgcgcagataggcagcgtcatgatgacgcatgactatctgcgctggtgcttaaccggcgtgaaaggctgtgaggagagcaacatctccgagtccaacctctacaacatggcgacgggccagtacgacccgcgtctgaccgagtggctgggcatcagtgaaatcgacagcgcgctgccccccgtggtgggttcagccgaaatctgcggggagatcaccgctcaggcagccgccatcaccggtctggcggcgggcacccccgtcgtcggcggcctgtttgatgtggtttccaccgccctttgcgccggtattgaggatgaatcaacgctcaatgcggtgatgggcacctgggccgtcaccagcggcatcgctcacggcctgagcgaccatgaggcccatccttacgtctatggccgctacgtcaatgacgggcagtatatcgttcacgaagccagcccgacctcctccggcaacctcgaatggtttaccgcccagtggggcgacctctcttttgacgagatcaaccaggcggtcgccagcctgccgaaagccggtagcgacctcttttttctgccgtttctctacggcagcaatgccggactggagatgacctgcggcttttacggcatgcaggcgctgcacacccgcgcccacctgctgcaggcgatttatgaaggcgtggtcttcagccatatgacccacctcaaccgcatgcgtgaacgctttaccgacgtttgcgccctgcgcgttaccggcggcccggcccactccgacgtctggatgcagatgctggcggacgtcagcggtttacgcattgagctgccgcaggtggaggagaccggctgcttcggcgcggcgctggctgcccgcgtcggcaccggcgtatatcgcgatttccgcgaggcccaacgcgacctgcagcacccggtgcgcacgctgctgccggacatgaccgcgcacgccctctaccagcgcaaataccgccaataccaggatttgattgaagcactacagggctatcacgcccgtattaaggagcacgcattatgagccgaccattactgcaactggcgctcgaccacaccagtctggaagcagcccaacgcgatgtcgccctgctacaggatcatgtcgatatcgttgaggccggaaccatcctttgtttaaccgaaggccttagcgcggtgaaagccctgcgagcgcagtgcccggaaaaaatcatcgtcgccgactggaaagtggccgatgctggtgaaaccctggcgcagcaggcttttggcgctggcgccaactggatgactatcatctgcgccgcgccgctcgcgaccgtcgagaaaggccacgccgtcgcgcaatcctgcggcggtgaaattcaaatggagctgttcggcaactggacgctggacgacgcccgagactggtatcgcaccggcgtgcgtcaggcgatttatcatcgcggacgcgatgcgcaggccagcgggcaacagtggggagaagcggacctggcacgcatgaaggcgttgtccgacatcggccttgaactatcgattaccggcggcattaccccagcggatctgccgctgttccgcgacattaacgttaaggcatttatcgccggacgcgcgctggcaggtgccgcccatccggcgcaggtcgccgccgaattccacgcccaaattgacgccatttggggagaaaagcatgcgtaatcatccattaggtatttacgagaaagcactggcgaaagatctcagttggccagagcggctggtgctggcaaaaagctgcggttttgattttgttgagatgtcggtggatgaaaccgacgaacgtctctcacgcctggagtggacctcggcccaacgcgcttcgctggtgaacgcgatgctggaaagcggcgtcgccatcccgtcgatgtgcctctccgcccatcgtcgcttcccttttggcagccgcgacgaagcggtacgccagcgggcgcgtgaaatcatgaccaaagccattcgcctggcgcgcgatctcggtatccgcaccatccagttggcaggttacgacgtctattacgaagagcacgacgaaggcacccagcaacgtttcgccgaagggctggcgtgggcggtggaacaggccgcagcggcgcaggtgatgctggcggtggagatcatggataccgcgtttatgaactccatcagcaagtggaaaaagtgggacgagatgctttcgtcaccgtggttcaccgtttatccagacgtcggcaacctcagcgcctgggggaacaacgtgaccgccgagctgaagctgggtatcgaccgtatcgccgcaattcatctgaaagatacgctgccggtgaccggcgatagccccggccagttccgcgacgtgccgtttggcgaaggatgcgttgattttgtgggcatttttaaaacgctgcatgagctgaattatcgcggttcatttctgattgagatgtggacagagaaagccagtgagccggtgctggaaattatccaggcccgccgctggattgaatcacggatgcaggaaggaggtttcacatgttagagcaactgaaagccgaggtgctggcggccaacctggccctcccggcgcacgggctggtcacctttacctggggcaacgtcagcgcggtcgatgagacgcgcaagctgatggtcattaagccttccggcgtcgaatatgaggtgatgaccgccgacgatatggtggtggtagagatcgccagcggtaaggtcgttgaaggcaacaaaaaaccctcgtccgataccgcgacccatctggcgctctatcgccgctatccgcagatcggtgggatcgtgcatacccattcccgccatgcgacgatctggtcgcaggccgggctcgatctgcccgcctggggcaccacccacgccgactatttctatggcgcgatcccctgtacccgactgatgaccgttgaggagattaacggcgagtacgagtatcagaccggcgaggtgattattaaaacctttgaagagcgcggtctggatccggcgcaaatcccggcggtattagttcattcacacggcccgtttgcctggggtaaaaatgccgccgatgccgtccacaacgccgtggtgcttgaggagtgcgcctatatggggctgttctcgcgccagctggccccccagctgccggatatgcagcctgaactgctcgataagcactatctgcgtaaacatggcgcgaatgcctattacgggcagtaataccggcagtcacagcctgtgtcggatggcggctgcgccttatccgacctacaagatgtgcaatatcaatacgttgtgatgaactcttgtaggcccgataagcaaagcgccatcgggcattcagtttgcaaccgcgttgtcagagggccaaagattatactcaagaattaacgtgttccttactgtagcgccgcttccaggcggtaggcgtcaggccggtgtgcttgcggaagatctggcgaaagtaaccaacgtcattaaaaccgcaccgttccgccacctcttttaacgaacgcgcgtcgctaatcagcaacttttccgcctcgcgcacccgctggcggtggatggcttccgttagcgtaaggtgaaatacccgccgataaacgcgtcccagataatccacattgcaatgcagttctttcgccagaaccgagctggaaagcggcaggtgatagtgcgttcgaatcaactgctgtactttccaggccagcgacacgccagcggcctcggcgttttcattctgccgggcgtcaacggtgagctgctgcaaaatcagcagcacgatgaactccagcgccgggctgcgctggtgcttttcctgctcgttcataaactggcgaaaaagcgcaatcagcgcctgcggatcggcaacctgggtatgctgcggcacggaaagatgcgtcagccagcgcgggttgctgtccggcgctttgacctcaaaatggagccagtaaaatttaagatcggcgggaaactcctcaacgccaatatggcggcgatgcggccaaagcaacaggctttccccggcttcgacacagaaaacacattcttcttcctgaattttcaggcagcctttttccacaaatataatttcccacgattgcagacgcctggcaggatgacgcccaatgccgcgagaaataaataatccgccgttttggactttaatcggtaatgtcatggataattcgagcattaatatgtcatttcccgctcattcagcaccgtatttcatattagcttttgattattaactaaaaatagtcatttcactcgatccatctcacatttttaaatacgggtcggaatcgtcatctttttttactcttttatcgccttgtcgctcaccgctatctgggcaaaatgaatcaggtcataacgcgaaaataaaaattactgccataaaataccccgtcagcgaggaatatctatgacctctacagccttaaggagcacgaaatgaacgtactggaagtcgatctgcataaactgacggtcagcgatccgttcctcggacagtatcaacaactggttcgcgatgtggttattccttaccagtggaatgcgttaaacgatcgtattccagaggctgaacccagccatgccattgaaaatttccgcattgccgcaggccagcagacgggcgacttttacggcatggtctttcaggacagcgacgtggcgaaatggctggaagcggttgcctggtcactgtgccagaagcccgatccagcgcttgagaaaaccgccgatgaggtgattgaactggtggccgccgcgcagtgtgacgatggctatctcaatacgtactttacggcaaaagccccgcaagaacgctggagcaacctggcggagtgccacgagctttattgcgccgggcacctgattgaagcgggcgtcgccttctttcaggccactggcaagcgtcggctgctagacgtcgtttgtcgcctggccgatcatatcgacagcactttcggccctggcgaaaatcagctgcacggctatccgggccacccggaaattgagctggcgctgatgcgtctgtatgaggtaacagagcagccgcgctatatggcgctggcaagctactttatcgggcagcgcggcgtccaaccgcacttctacgacgaagagtacgaaaaacgcggccagacctcgtactggcatacctacggcccggcgtggatggtcaaagacaaagcctacagccaggcgcatctgccaatttcgcagcagcagacggccattggccacgcggtacgttttgtctatctgatgactggcgtggcgcatctcgctcgcctgagcaacgatgaaggcaaacgccaggactgcctgcgcctgtggaaaaatatggcgcagcgtcagctgtatatcaccggcgggattggctcgcagagcagcggcgaagcctttagcagcgattacgatttaccgaatgattcggtctatgcggaaagctgcgcttcaatcggcctgatgatgttcgcccgccggatgctggaaatggaagccgatagccagtacgccgacgtgatggagcgcgcgctgtacaacaccgtcctcggcggtatggcgctggatggcaagcatttcttctacgtcaacccgctggaagtgcatccaaaatcgttaaaattcaaccatatttacgatcacgttaagcccatccgccagcgctggtttggctgcgcctgctgcccgccgaatatcgcccgcgtgctcacctcccttggtcactacatctacacgccgcgtgcggatgcgctgtacatcaatatgtacgtgggtaacagcatggaaataccggttggaaatggcgcgctcaaactgcggattggcgggaactacccgtggcaagagcaggtgaagatcgccatcgactctgtgcagccggtacgtcacacgctggcgctacgtctgccggactggtgccctgaggcaaaagtgacgctcaacgggctggaagtggagcaggatattcgcaaaggttatctgcatatccgtcggacctggcaggagggcgatacgataaccctgacgctgccgatgccggttcgccgcgtgtatggcaatccgctggcgcgtcacgtcgccggtaaggtcgccattcagcgcgggccgctggtctattgccttgagcaggccgataacggcgaagaactgcataatctgtggttaccgaaagagagtgagttccgggtctttgagggcaaagggctttttgcgcataagatgctgattcaggctgaaggcgagaagcaaagcgccccagatgcgcagcatcaggcgttgtggcactacgataacgcgccgtcatcgcgccagccgcagacgctaacgttcattccgtggtttagctgggccaaccgtggcgagggcgaaatgcggatttgggttaacgagcggtaatactgtgccggatggcgactgcgccttatccggcctacaagatttgcaatatcagtatattgcgatgaatttttgtaggcccgataagcgcagcgccatcgggcattacctcttgcgtcagaacagccccagcggcttatcggaatagctcaccagcaggcacttggtttgctggtagtgttccagcatcatcttatgcgtttcgcgcccgatgcccgactgcttatagccgccgaacgcagcatgtgccggataggcgtgatagcagttggtccatacgcgcccggcctgaatgccgcgccccatcttataggccagattgccgttgcggctccagacgccagcgcccaggccgtattgggtatcgttagcgatttccagcgcctcctccatggttttaaaggtggttaccgccagcaccgggccaaagatctcctcctgaaagacgcgcatattgttcttaccaaacagaatggtaggctcaaggtaatagccctctttaagttcgccatccagctccttgcgtcgcccaccggtcagaatatcggccccctcttttttaccgatatcgatataattgaggatagtctcaagctggccgtgggagacctgcgcccccatctgtgtaccgctatctagcgggttcccgctgcgaatgctctctacccggcgaatagcgcgctccataaagcgctcatagatggactcctggaccagcgcacggcttggacaggtacacacctcgccctggttaaaggcaaacagggcaaatccctccagcgctttatcaaagaacgcatcttcctcatccatcacgtcggcgaagaagatattgggcgacttgccgcctaactccagcgtcactggaataatattctgcgtggcgtactgcatgatctgttgacccacttccgtcgaaccggtaaacgccaccttcgcgatacgtttcgaggtcgccagatattcgccaatctcgccgcccgcgccgttcacgacgttgacgacgcccggcggtaacagatcgccaatgacttccattaacagcagaacggaaagcggcgtcaggcgtgccggtttaagcaccacgcagttacccgccgccagcgcgggcgccattttccagcttgccatcaacaacggaaagttccacgggattatctgtcccacgacgccaagcggttcgtgaaaatggtaggccacagtttcgctatcaacttcgctgatcccgccctcctgcgcacgtatacaggaggcgaaatagcggaaatgatcgatcgccagcggtacgtcggcggcgctggtttcacgaatcggtttaccgttatcccaggtttccgctgtcgccaacagttcgaggttttgttccatccgatcggcgatcttaaacaagatagcggcacggtcttgtactgacgtatgcgcccacttatctttcgccttatgcgcggcgtcgagcgctaaatcgatatcttttttaccggaggaagcgacttcacatagcggctggccggtcactggcgtcaggttttgataatattcgccgtcggcgggcgcaacccagtcaccaccaataaaattgtcatagcgggcttttaacttcagtgggtacccgtattcacctggctgaatacgtgttgaagggggattgttcgtcatgaccaactccttattgtaaaggtactccacaagggtagacggtgctggtgaatttttcgccaatgatttcccgctttacgacagcaatcacgaattactttcctttacgtttctccgtctggttttagccatactaaacaggtgcctgtttaacgtacggagaacactatgcagcaatatatcggtattgatgtgggaggaactcacgtcaaatatggcgtgattaacagtgacggcgaagaattaacccatcatcaattcgatacgccagaggacgcctccacgtttacccgcaaatggcaggatgtggtggcgcgttgccaacaggactatgacattgcggcaatcggggttagtttccccggccatattaatccccataacggtcatgcggcaaaagcgggcgcgctggcttacctggatgacgtcaacctgatggagttgttcagcgggctgaccgatctgccgctggtcgtggagaacgacgcgaactgtgcggcgctgggcgaaatgtggcgaggtgccgggcagcattatgacaatctggtctgtattaccattggaaccggcattggcggcggtattatcgtcggacgagaactgtatcgcggcgcgcattttcacgccggtgaattcggcgtcatgccggtcgggaataatggcgaaagtatgcataaaatcgcgtcaaccagcggattaatggcgtcgtgccgccaggcgctggcgctgcctgccgaagagatgccgcctgcggatgtgatcttcgaacgaatggcgaccgatgttcatctgcgtgaggcggtcaatgactgggcgcgttatctttcacgcggcgtttacagcgtgatctctatgtttgatccgggcgtggtgctgatcggcggaggaataagcgaacaggaaaagctctacccgctcctgacgcggcatcttgaaacgtttgaaatgtgggaggcgctccaggtgccgattcagccctgccaactgggaaatcaggcgggcaggctgggcgccgtctggctggcgcagcaaaagctcgcccgaagctaacgagttacgccttatccggcctgcatcgtctacgcaggcccggtaagcgtccgcgccaccgggcaaaggcgttacatcgccgtgcgataaagttccacaatctcatcgtgagtcgcctgaataaggcgcaaagaatacgggcaaaattattctgataacaggttcacgctggctattttaagaagccagaaaaataaaaagcaacgcaataattgtattgcttcatttgttatttaatttaaccatttcattctttttgcggaaataataacgcatcacgtaataaatgatcattcccacgacgtcgtgtaaacccaatccggtcaaaatattcaaggatctgaatggccagtttccgccctacattcagcctgtcgcgaaaatccgccgcacacgttgatcctctctcttgatccagctcgcggatcatattggcgaaagcgacaatccgatcgttacgatagtaccgatcttttacgatcgcggtaatgatgccttgctgtgccgcctgccgcagcaccagccgcatcaattgttcttccgttccggtctctttcgccagatcgcgtacccaccagggctcatcgccaaatagcggttcgactttttgccagacggcctgctgctcatcgctaaatcctgctttatgatccggcagatgcaaccaaccgtgatggctatgaatcaggccgtcgtcgcgcatccgctcgatcagcatcagaaccagcgcttcatcctccatcggcagggccatgcggcgtaaacgctcgcgtcccggccccggttcatcgcggtgctgttcgtggtaggtcgccagcgtatcaagaatcttacgctgccagcgggcggcgacgggcgcgcttaacagattgtctccggcctggataaaaccatgttgctcaataagctgacgcataccgacaggattaagctgacgcgcccaaccgaaatccggcaggttgacggcgccgcgttccagatgaatggccaacgccgcgctatcgtcctgcgcggcggcaagcgttgaaagccagtgcaaataatctggcttacgtttaccgcgacgcggcgccttaagcgtcaccacgcgtgcgccggcaagggtggcgcgtgcggaaatatcacgcagcaccagtctgtcattatcggccagccacaacggcgtatcaaagatcagctcggccagcccgccttccagcaaagagacgcgaccggtcacatggctggcggcatggtgaatatgtagcggttgccattgggaaagcggcgcatgaagcgccagagaaacgatcacccgggaaaaagcttcccccaccggcgcatcggaaagcagccagtcgccgcggttaagctgctccttctccgcatcgcccgcaatattgagcgcaatacgttgcccggcatacgcatggtcggtgggctgattttgcgcgtgtagacttcgtacgcgcatcggcgtattaacgccggtcaaccatagcgtatcgcccacgtttacctctccgctcaacgccgttccggtcaccaccagtcccgcccctttcaccgtaaacgcacggtcgatagccagacggaagcgatgctgcgcggcgtgtaaacgtgcaggaagctgctgtaaatgagcgcgaagttctgcaataccgcgtccttcattggcggcggtgacaaataaaacggtatcggcgaagccatagttgtcgagcgccgccagcacctcttcacgtacttcaccgatacgcgcctcgtccacgcgatcggctttggtcagcgcgacggtgagctggagattacccgtcagttgtaggatctgtaaatgctcgcgcgtttgcgccatgacgccgtcatcacaggcgaccaccagcaaagcgtgatcgataccgcctacgcccgccagcatgttagagaggaatttttcatgcccaggcacatcgataaagcccagcacacgaccatccggctgcggccaataggcgtagcccagatcgatagtcatcccgcgttttttctcttccggcaggcgatcggcattgaccccggtaatcgcctggagcaacgtcgttttaccgtggtctacgtgtccggcagttgcaataatcatttcagcatcatctccataaaccggctttcgtcttcaagacagcgcatatccagccataaacggccatcataaattcggccaatgaccggtacaggcagcatgcgccagcgggccgccagcgcctccagccgactaccgcgcccgtcgtgcggggtaaaggtcatggcggcgctgggaaggcggtctaccggtaatgaaccgctgccgatttgcgacaggcagggtttaacctccagcgcaaattcatcgccgtaacgtgccgccagccgcgcctgtaaccgctgcgcttgttcgcgaatcgacgcttcactgcgagttaacagacgcagggtgggtaatttctccgccaacgcttccgggtgcagatacagacgtaacgttgcctccagcgccgccagcgtcattttatcagcgcgcagagcgcgcttcagcggatggctttgcagttgggcaatcatcgcttttttgccgacgataatcccggcctgcggcccgcccagcaacttatcgccggagaagcttaccaggctgacgcctgcggcaatgagctgctgcggcatcggctctttgggtaagccatattgacttaaatccaccagcgaaccgctgcccagatccgccaccaccggaatatccagctctcgcccgatttccgccagttccgcttcctctaccgttttggtaaagccctcaatgctgtaattactggtatgcaccttcatcaacagcccggtattttcatttaccgcctgacggtaatctttcgcgtgcgtccggttggtggtgcccacttcatgcagcgtacagcccgcctggcgcataacatccggaatacgaaacgcgccgccgatttcgaccagctcgccacgcgaaactaccacctctttgccgctggcggtcgccgccaacatcagcaataccgccgccgcattgttattgacgatacaggcgtcctccgccccggtgattcggcataacagcgtcgccagcgcccggtcgcgatgcccccgcccggcgccatctaaatcgtattccagcgtcaccggcgcgcgcatcgcctgcgttaccgcctcaaccgcttcttgcgcctgcaatgcgcggccaagattggtgtgcaacaccgtccccgtcaggttaatcaccgggcgcagcgcgctttgcgccgcattttccagccggagtttcgcctcttgcgcccagtctgcgtaccagtcgggaagcgtttgcgtattccggatgacgtcgcgcgcgtcgtcaagcatccgcctaagcagatcaaccacctgggtatggccataccgatcgcgcagagaaagaaaggcgctatcgtgcaataaacgatcgatagcaggaagctggctgtagagtgtacgcgtttcgcttgtcatgaaaatgcctggctgttggtggccctctcctggtgggagagggatatcgacataagggggattgtaacgtgagtttgctcaggcggacataatgcgcgtcaagcctttggcgcttcggtgcgggcaaagctttcgcgttgaaaaagcgtttcgaccagtttgaccaggtgggggcggctaacacaccagccaggcgcgacccggcggaagttgagatagcctaccgcacaggcaatcgcgatagtcgccagattgaccgtatccgtttttagcgtcccgtcgctcagataactttcgagcatatccaggctgcggttgattttttcccgctggcgcaacagttccgtttccgattgttgcgccgccgggcgcgcctgttcgcgtacagaaaccaacgctgcatccataatgccgtcagccaacgcttcaagctggcgaactttaagcgctgccatcgggtcacgcgggagcatcgctggcgcgatatccagcagctcaatatattccgcgatgatcggcgaatcgaaccagtactcccctttctccgtcaccagcgctggcaccttacccagagggttgtattgcgccacgccgttatccgcctcgtagggtagttcattaataaattcgaaggtaatgcctttttcgagcagcagaacagagattttgcgcacaaaagggctggtgtagctaccgatgagtttcatgccgtgtcctttttgccaaccagtaaaaatcatagtatggctcaaataagacgaaaagagacacaaaaggaggttgctgaatgacataacgtgagagggctcgcgacaaaatgtttgccggatcgtattgacgttacccgggcttaaaatttcttgtgaagaggatcacaaaaattcaacaaagcaccaaaataaaaatgtgaaatatctcacataaaatggtcttttaagggctaaaaattagattcgttgtttttttacacagccaatttgtgatcaatatcacatcaattacctctctaccccctatatttatgtgacacaaatcacataaattgtccctgtctggacagttgaacgattcagtgccagattgcgcagtatctacactacagggtccggctacctctgccgctacattaacaaacctcgggctttcagcctgcgcgacagcaacataagaaggggtgtttttatgtcatccgatattaagatcaaagtgcaaagctttggtcgattcctcagcaatatggtgatgcctaatatcggcgcgtttatcgcgtggggtattatcaccgcattatttattccaacagggtggttgcctaacgaaacgctggcgaaactggttggtccgatgatcacctacctgctgccgctgctcatcggttataccggcggtcgtctggttggcggcgaacgcggcggcgtggtgggcgctatcactaccatgggcgttattgtcggcgcggatatgccgatgttcctcggctcgatgatcgccggtccattaggcggctactgcattaagaaattcgacagttgggtagacggtaagatcaaatccggttttgagatgctggtgaacaacttctccgctggcatcatcggtatgatcctcgccatcctggcgttcctcggtattggtccggcggttgaagtcctgtccaaaattctggcggcgggcgttaacttcatggtggcgcacgatatgctgccgctggcgtccatttttgttgaaccggcgaaaatcctgttcctcaataacgcgattaaccacggcatcttctcaccgctgggtatccagcagtcccatgagatgggtaaatccatcttcttcctgattgaagctaacccgggtccagggatgggcgtcctgctggcgtacatgttcttcggtcgcggcagcgctaaacagtctgcgggcggcgcggcaattatccacttcctgggcggtatccatgagatctacttcccgtacgtgctgatgaacccacgcctgattctggcggtgattctcggcggtatgactggcgtattcaccctgaccatcctgaacggcggtctggtttctccggcttctcctggctccattctggccgtactggcgatgacgccaaaaggcgcttacttcgctaacatcgctgccatcgtggcggcaatggcggtctccttcgtggtttctgcaattctgctgaaaaccagcaaagtgaaagaagaagatgacattgaagcggccacccgtcgtatgcaggacatgaaagcggaatctaaaggcgcctctccgctggcggctggcgacgtgaccaacgacctgagccatgtgcgtaaaatcatcgtggcttgcgatgccggtatgggttccagcgcgatgggcgcaggggtactgcgtaagaaagtacaggatgcgggcctgagccagatctccgtcaccaacagcgccattaacaatctgccgccggatgtggatctggtcattactcaccgtgaccttaccgagcgcgcgatgcgtcaggtaccgcaggcgcagcatatttcgctgaccaacttcctggatagcggcctgtacaccagcctgaccgaacgtctggttgccgcacagcgccacaatactaatgaagagaaagtacgcgatcatctgaaagacagctttgaggagggtgataacaacctgttcaaactgggtgcggagaatatcttcctgggccgtaaagccgctaacaaagaagaggcgattcgctttgccggtgaacaactggtgaaaggcggctatgttgagccggaatacgtcgaggcgatgctggaccgcgaaaagctgacaccgacttacctcggtgaatccatcgcagttccgcacggtacggtagaagcgaaagaccgcgtgctgaaaaccggcgtggtgttctgccagtatccggaaggcgtacgcttcggtgaagaagaagacgatattgcccgtctggtcattggtatcgccgcacgtaacaatgagcacatccaggtcatcaccagcctgaccaacgcgctggatgatgaatccgtgatcgaacgtctggcgcacaccaccagcgtggatgaagtgctggaactgctggcaggtaaaaaagcttaacagttaagtatccccaaaatagttcgagctgcaggaaggcggcaacgcagtgaatccccaggagcgtacataagtacgtgactggggtgagcgaggagagccaacgcatctgcagttcgaaatatgaaggcgatatcctctcccttgtggagagggttaggttgagggaaaagcctcgccccagccctctcgggtaaaaacattaatgaaggttaatactatgaaagcattacattttggcgcaggtaatatcggtcgtggctttatcggcaaactgctggctgacgcggggatacaactgacgtttgcggatgtaaatcaggtcgtactcgatgccctgaatgcccgtcatagctatcaggttcatgttgtgggtgaaaatgagcaggtggataccgtttccggcgtcaacgctgtcagcagcatcggcgatgatgttgtcgacctgattgcccacgttgatttaatcactactgccgtgggtccggttgtgcttgagcgtatcgctccggccatcgctaaagggctggcaaaacgtaaggcgcagggcgtggatgccccgctgaatatcatcgcctgtgaaaacatggtgcgcggcaccacacagctgaaaggccacgtaatgaatgcgctggcggatggcgataaagcctgggttgaacagcacgtcggttttgtcgattccgccgttgaccgcatcgtgccgccatctgcttctgcgacccatgacccgctggaagtgacggtagaaaccttcagcgagtggatcgtcgataaaacccagtttaaaggcgcgttgccaaacatcccggggatggagttaacggataacctgatggcatttgtcgaacgtaaactcttcacgctgaacacaggtcatgctataaccgcgtacctcggcaaattagccggtcatcaaaccattcgcgacgctattctcgatgagagtattcgcgcggtggtgaaaggcgcgatggaagaaagcggcgcggtgctgatcaaacgctacggttttgatgccgacaaacatgcggcatacattcagaaaatcctcggtcgttttgaaaacccgtatctgaaagatgacgtcgaacgcgtaggtcgtcagccgctacgcaaactcagcgcgggcgaccgtctgatcaaaccgctgcttggcaccctggaatatggtctgccgcatgtgaatctggtcaaagggatcgcggcggcgatgcatttccgtagcgatgaagatccgcaggcgcaagagttggcggcactgattaccgaaaaaggcccgcaggccgcgctggcgcaaatttccgggctggatgccaatagcgatgtggtggcggaggcggttaacgcatataacgcgaccaaatgacgcagaatccggcgcaggttagcctgcgcccaaataacagattgtcagatatgcaggcaataatggaacaaacccaggcctttgaaaatcgtgtgcttgagcgtctgaatgctggcaaaaccgtacggagcttcctgattaccgccgtcgagttattgaccgaggcggtgaatattctggtgctccaggtgtttcgcaaagacgactatgccgtgaaatacgctgtggaaccgttgctggatggcgacgggccgctgggcgatctttcggtacgtctgaaacttatctatggcctgggcgtactcagccgcaccgaatatgaagatgcggagctgttaatggcgctgcgcgaagagctgaatcacgacggcaatgagtacgcctttaccgacgatgaaatcctcgggccgtttggcgaactgcactgcgtcatggcgctaccgccgccgccgcattttgatacgtccgacgcggcgctatacgccatgcaaattcagcgctaccagcaggcggtgcgttcgacgatggtcctctctctgaccgagctgatttctaaaatcagcttaaaaaaggcctttcaaaagtaaatcccgccgttaacctctttcttcttcttttggtcggtacagccgccggtaatattccagacgctgcaaataaatgggcgcgctctccgacggcacctcggaaggaacataatcacgcggcggcgttttattcaggtattcacggaacgcctggctggacgccataaaatcgacggctttatcaataagaagtggtacgttctcacctatttttgccatgatagatcctccatgtgggacccgcgtctgactcccgcggtcgcttatttgagtttaggatcaatttagcgttgtcattgaggaaaatgtgcttaatcgcttttcttgccgacaaaagggcgcttcatcttttctttcgacaaaaaggattttattctcaacgagataattaaataatgagcagtgtaatacttgccataattgattatctttacgtcatgagttgtgaagaatcactcactgcgcgcatactataaggtatctatcccatttctatcagaagctatcccatgaaagaagttgaaaaaaacgaaattaaacgcctgagcgatcgtcttgacgctattcgccaccagcaggcaggtctctctctggttgaatccgccgataaatacgcggagctggaaaaagaaaaagagacgctggaagcagaaattatccgtctgcgcgaagtacacagccagaaactgagtaaagaagcgcagaagctgatgaacctgccgtttcgccgcgcgatcactaaaaaagagcaggccgacatgggcaagttgaagaaaagcgtgcgtggcctgattgttgtccacccgatgacggcgctgggccgggaaatggggctcaaagagatgacaggtttcgcgaagagcgagttctaaaccttccgcatcccaggctctcaggacacccgttgtacggaggatgtcttgagagcatcgggctatattccgaatttttcatggaagtatttacaccgattatatacaagttcatttttaacggtaatccctgctttttcaggatgaaaaatcccactatcgtgcctgtttgtatttatacaatgaattttttcatcctcttttctcataccccgcagaatatgattgacccgcaaaattaaataacattatcatccctgaaaaaaatccccatacataaacattataattatatttttataaagcattgctatgagcaattgataaataacgtcgggtttttgcgcgcttctatagaagcgacgaatgttttcattctaaccatacgttaatgagttattggcaatactcgctgaatgatgagctagttgtataaataacaggttaactatttatattatataaattattaacaaggatatttcatatgcacaaaaatggaaaatttatccccctgcttgcgttgggattcacattctttttatctggttgtgattacttcgcagataaacaccttgttgaagaaatgaaagaacaacaaaaagaacaagaaacaaagataaacctgttagaaaaacaacaaaaagaacaagaagcaaagataaatctgttagaaaaacaacaagctacgattatcaacacaaccaaaaaggtcaccgaagtcgttggccgcgttgaacgcaaacaacggctattcgactatacagaactggacccatcacaaacgcactattttattattaacaacggcaatatcggattagccgggcgtattctatctattgagccaatagataatggaagtgttattcatcttgatttagttaacttactcagcattccggtatcaaaccttgcgtttaatatgacatggggtacgaaaaaaccttccgaggcaaaagatctgcctcgctggaaacaactcctgctcaacacgaaaatggactcgacaatcgaactcttaccgggagcatggacaaacgtcacgctaacattaaaaggcgtatcgcccaataatcttaagtatctaaaaataggtattgacatggagaatgtcatattcgacagcatacaacctattaacgatacaaaaaagaagccaaaaaaataatagccattgatacaattattttagaaaaggaaattactcattcatgaatagaatatttaaagtcctctggaatgccgctacgggaacatttgttgtcaccagcgaaaccgcaaaaagccgcggcaaaaaaaacggccgcagaaagctggcggtttccgcactcatcggtcttagcagcattatggtttctgcggatgcactggccaacgcaggaaacgatacaggcgacggcgttactccaacgggtacccagactggaggaaaagggtggattgcaattggtaccgatgccacagccaatacttacaccaacgttgatggcgcaagcgccgcaatgggttataaagcctccgcgatggggaaatggagtaccgccattggttcctacagccagtccaccggcgactcttcgttagcgcttggcgtaaaatcggtttctgccggtgaccgggccattgcaatgggcgcctcatcctcagccagtggaagttattcaatggcaatgggtgtgtatgccaattcgagcggcgcaaaatcggttgcgttaggttataaatctgtcgcgagcggagcaacttcctctgcattaggttatcaagctactgcgagcggcgacgacagcgctgcttttggtaatggcgcaaaagcggtaggcaccaactcagttgcccttggctcgggctctattgcccaggaagacaattccgtcgccgtgggtaacagcaccactcagcggcagatcacctacgttgctaaaggcgacatcaattccaccagtaccgatgccgttacaggtgcgcaaatttattctttaagtcaatccgtcgccgatcgactcggcggaggggcttccgttaattctgatggtacagtgaatgcgcccctctacgaggtaggcacaggcatctacaataacgtaggcagtgcattaagcgcacttaacacgtctatcactaacacagaggcctctgtcgcaggattagccgaagacgcgctgttgtgggatgacagcaccagcgcctttagcgctagccacacgggaaacgccagcaaaatcaccaatctggcggcaggcaccctggccgcagacagcaccgacgccgttaacggctcccagttgtttgatacgaacgagaaagtggatcagaacactgctgatatcaccgccaataccgacagcattaaccagaacaccgctgatatcaccgccaataccgacagcatcaatcagaacacaaccgatatcgccgccaatacgaccagcatcaatcagaacaccactgatatcgccaccaacaccaccaatatcaacagtctgagcgactccgtcaccacgctcaccgatgatgcactgctttgggatgcagcctctggcgcattcagcgctaagcacaacggaaacgacagcaaaatcaccaatctggcggcgggtaccctggccgctgacagcaccgacgccgttaacggctcccagttgtttgatacaaatgagaaagtggatcagaacaccgctgatatcaccaccaataccaacagcatcaatcagaacaccactgatattgccaccaacaccaccaatatcaacaacctgagcgattccatcaccacgctcaccgatgatgccctgttgtgggatgcagcctctggcgcattcagcgctaaccacaacggaagcgccagcaagatcaccaatctggcggcgggcaccctggccgcggacagcaccgatgcggttaacggctcccagttgtttgccaccaacgaaaatgtgtctcagaacaccgctgatatcaccaccaataccaacagcatcaatcagaacaccactgatattgccaccaacaccaccaatatcaacaacctgagcgattccatcaccacgctcaccgatgatgccctgttatgggatgcagcctctggcacattcagcgccagccgtagcggaagcgccagcaagatcaccaatctggcggcgggcaccctggccgcggacagtacagacgcggtaaacggctcccagttgtatgaaaccaaccagagggtggatcaaaacacctctgctatcgcagatattaatacgtccatcaccaatcttagctctgacaacctgagctggaatgagacaacgagttcgttctctgccagccacggaagtagtacgacaaacaaaatcaccaacgttgctgccggagagctgtctgaagaaagtaccgacgccgttaacggatcgcagctgttcgaaaccaatgaaaaagtggatcagaacacgaccgatatcgccgccaataccactaacatcactcagaacagcaccgcgattgagaacctgaatacttctgtctccgacattaatacgtccattaccggcctcactgataacgctctgttatgggacgaagacatcggcgctttcagcgcaaaccacggtggaagcaccagtaaaataaccaatgtcgccgccggggcgctttctgaggacagtacagacgcggtaaacggctcacagttgtatgaaactaaccagaaggtggatcaaaacacctctgctatcgcggatatcaatacgtccatcaccaatcttggtaccgatgcactgagctgggatgacgaagaaggcgcgttcagcgccagccacggtaccagcggtaccaataagataaccaatgtggctgcaggtgaaatcgccagtgacagtactgacgctgttaatggctctcagctctatgaaactaacatgctgatttctcagtatagtgaatctattagccaactagccggcgataccagcgaaacctatatcacggaaaatggtaccggcgtgaaatacatccgtacgaatgataatgggcttgaaggccaggatgcatacgcaacgggtaacggcgcaacggcagtaggttacgacgccgtcgcctctggcgctggcagtctggctcttggccaaaacagcagcagcagcattgagggcagtatcgctttgggcagtggctccacctctaaccgcgctattacaaccggtatacgagaaacgagcgcaacaagcgatggcgtcgtcattggctacaatacaacagacagagagttgctgggcgcgttgtcattggggacggatggagaaagctatcgtcaaattaccaacgttgctgacggctctgaagcgcaagatgcggtaacagttcgtcagttacaaaatgccattggtgcggtcactactacaccgaccaagtactaccacgcaaactcaacggaagaagattcactggctgtcggaactgactcactggcaatgggtgcgaagaccatcgtcaatgctgatgcaggtattggtattggtctgaatacactggtgatggctgatgccatcaacggtattgctatcggttctaacgcacgcgccaatcatgcaaacagtattgcaatgggtaatggttctcagaccactcgcggcgcacagactgactacaccgcctacaacatggacacaccgcagaactctgtcggtgagttctctgtcggcagtgaagacggtcaacgtcagatcactaacgtcgcggcgggttcggcagataccgatgccgttaacgtgagtcaattgaaagtaacggacgcgcaggtttccaggaatacccagagcattactaacctgaatactcaggtatcgaatctggatacccgcgtcaccaatatcgaaaacggcattggcgatatcgtcactaccggtagcaccaagtacttcaagaccaacaccgatggcgcagatgcaaatgcccagggtgcggacagcgtcgcgattggctctggctctattgctgccgctgaaaacagcgtggcgttaggcacaaattccgtcgcagatgaagctaatactgtgtctgttggctcttctactcaacaacgccgtattaccaacgttgccgcaggggtgaacaacactgacgcggttaatgtggcgcaactgaaagcctcagaagcaggctccgtgcgttatgaaaccaatgcagatggctcggttaactatagcgtgctcaacctgggagacgggagtggcggcaccactcggatcggcaatgtttcagcggcggtgaatgatacggatgcggttaactatgcgcaattgaaacgcagcgtcgaagaagcaaacacctataccgaccagaaaatgggggaaatgaacagcaaaatcaaaggagtagaaaacaagatgagcggcggtatcgcttcagcgatggcgatggccggtctgccacaagcctacgccccgggcgccaacatgacctcgattgctggcggtacgtttaatggtgaaagtgccgtcgccattggtgtctccatggtaagtgaaagcgggggctgggtgtataaattgcaaggaaccagcaacagccagggcgattactctgcggccattggcgcgggcttccagtggtaatgaagtaacaacactcccgacatcaaaggcaatggcataatgccattgccttttcacttccctttgctgtcctctcccctcaactggccctaccaattttagccagttaccacagcctactcacatttcactaaattaactctacaataccgttgccaataaataacatctggttaactatttgttgtcattatccatacacaacaatattggcaggaccacttttacacataatgtgacttcaacgagatgagcaaagattcatcccattatgcgtgtggttctcaggagacctgcaatgaacctctggcaacaaaactatgacccggcgggtaatatctggctttccagcctgatcgcatcgctcccaatcctgttcttctttttcgccctgattaaactcaagctgaaaggctatgttgccgcttcgtggacggtggttatcgcgctcgccgtcgcgctgctgttctataaaatgccggtcgatcacgcgctggcatcggtcgtgtatggcttcttctacgggctatggccgatagcctggataatcatcgccgcggtctttgtctataaaatttcggtcaagaccgggcagtttgacattattcgctcgtcaattctgtcgattacccccgaccagcgtctgcaaatgctgattgtcggcttctgcttcggcgcgttccttgaaggcgcggcaggtttcggcgcgccggtggcgataaccgccgcgctgctggtgggtctgggctttaatccgctgtatgcggcagggctgtgcctgattgtaaacaccgcgccagtcgcctttggcgcgatggggatcccgattctggttgccggacaggtcacgggcctggacagctttgaaatcggtcagatggtcggtcgtcagctaccgttcctgaccattatcgtcctgttctggattatggcgattatggacggctggcgcggcgtgaaagaaacctggcctgcggtgatggtcgctggcggctcgtttgctatcgcccagtatctcagctccaactttatcgggccggaactgccggacatcatctcttcactggtgtctctggtgtgtctgacgctgttcctcaaacgctggcagccggtacgcatcttccgcttcggcgatatgggcgcgtcgcaggtcgatcagacgctggcccgcacccgctatacgacagggcaaattgttcgcgcctggtcgccgtttctgttcctgaccgccacggtcactctctggagcgtaccgccgtttaaagcgttgtttgcccccggcggcgcgctgtatgactgggtaattaacgttccggtaccgtatctcgataaactggtcgcccgtatgccgccggtcgtacacgaagcgaccgcttacgcggcggtgtataaatttgactggttctccgccaccggcacggcgatcctgtttgccgcgctgttgtctatcgtctggctgaaaatgaagccctcagccgcaatccagacctttggcagcacgctgaaagagctggcgttgccgatttactccatcggcatggtgctggcgttcgcgtttatctcgaactattccgggctttcctccacgctggcgttagcgctggcgcacaccggcagcgccttcacgttcttctcgccgttcctcggctggctgggtgtcttcctgaccgggtccgacacctcatctaacgcgctgtttgcctctctacaggctaccgcggcgcagcaaatcggcgtctctgatgtgctgatggtggcggcgaacaccactggaggcgtaaccgggaagatgatctcgccgcagtctatcgccatcgcctgcgcggcggtgggactggtagggaaagagtccgatctgttccgttttaccgtcaaacacagcctgatcttcacctgtatggtgggcgtgatcactacgcttcaggcctatgttttaacctggatgattccgtgattgtgatgccaaaacgcctgtcagacgagattgcctctcgcgtgcgggcgctgattgaagaacaaaacctggaagcgggcatgaaattgcccgccgagcgccagttggctctacagcttggcgtatcacgcaactctttacgcgaagcgctggcgaagctggtcagtgaaggcgtgctggtgagtcgtcgcggcggcgggacatttgtccgctggcagcacgaaacctggtctgaacagaatatcgtgcaaccgctgaaaatgctgatggcgaacgatccggactacagtttcgacattctggaggcccgccacgccattgaagccagtacggcctggcacgccgccatgcgtgccaccgctgccgacaaagagaaaatcagactctgctttgatgcgacgctcagcgaagacccggatctcgcctcccaggccgacgtgcgctttcatctggcgatcgcggaagcctcgcacaatgtggtgctgttgcaaaccatgcgcggtttcttcgacgtcctgcaatcctccgtcaaacagagtcgccagcgtatgtatctcgttccgcccgtattctcaaagctgacggaacaacaccaggcagtgatggacgccattctggacggtaacgccgagggcgcgcgtaaagcgatgatggcgcacctcagttttgtccacaccacgattaaacgatttgatgaagaccaggcccgccaggcgcgtattacccgcctgcccggcgaccataatgagatgaccagggagaataaatcatgattatttcagcagccagcgattatcgcgccgcagctcagcgcacgttgcctcctttcctcttccactacatcgacggcggcgcgtatgcggaatataccctgcgccgaaatgtggaagacctgtcgcaagtcgctctgcgccagcgcgtgctgaaaaatatgtccgatttaagcctggaaacgaccctgtttaacgaaacgttgtcgatgccggtggcattagcgccggtaggcctgtgcggcatgtacgcccgtcgcggcgaagtacaggccgccgccgccgcagacgcaaagggcattccgttcaccctttccaccgtctccgtctgtccgatagaagaagttgcaccaaccattaagcgcccgatgtggttccagctttatgtgctgcgtgaccggggctttatgcgcaacgcgcttgaacgtgcgaaagcggcgggttgctccacgctggtctttaccgtggatatgccaacgccgggcgcgcgctaccgtgacgcccactccgggatgagcggcccaaacgccgccatgcgccgttactggcaggcggtgatgcaccctaaatgggcgtgggatgtcggcctgaacggtcgcccgcatgatttaggcaatatttccgcctatctgggtaaaccgaccggccttgaggactatatcggctggctggcaaataacttcgatccgtccatctcctggaaagatctggagtggatacgcgaattctgggacggcccaatggtgatcaaagggatcctcgatccagaagatgcccgcgatgcggtacgtttcggcgctgacggtatcgtggtgtcgaatcacggcggccgccagctcgatggcgtgctctcttccgcccgcgccctgcccgccattgccgatgcggtgaaaggcgatatcgccattctggcggatagcgggatccgtaacgggctggatgtcgtgcgtatgattgcgttgggggccgataccgtactgctgggtcgggcctatctctacgcgctggcgacggcaggaaaagcgggtgtcgccaatctgctggacctgatcgagaaagagatgaaagtcgccatgaccctgaccggcgcgaaaaccattagcgaaatcagtggcgattcactggtgcaggaactggggaaaagtttgcccgccgcgctggcgccaatgagcaaaggcgataccgcctgaacgcctggcgcgtgagagcccggtaaatttctgctattctgcccccccgcatttaagggggcatcatgcttaacatcgtactcttcgaaccagaaatcccgccgaataccggcaacatcattcgtctttgcgccaataccggctttcgtctgcacatcatcgaaccgatggggtttacctgggatgataagcgcttacgccgcgcagggctggactatcacgaattcgccgcggttcagcgccatcacgattatgccgcctttgtcgccgccgaaaacccgcagcgcctgtttgcgttgacgacaaagggcacgcccgcccatagcgccgtaagctatcaggatggcgattatttgatgtttggcccggaaacgcgcggcctgcccgccagcattctcgatgcgttgcctaaagagcagaagattcgcattccgatgatgccggatagccgtagcatgaacctgtcgaatgcggtgtcggtggtggtgtatgaagcgtggcgccagttaggatactccggcgcggtattacggtcgtaatatattcaatgccggatggcagctgacgcctgatccggcctggccgatcccgatggcatgttcccgtttatgcggactctcgctcaatcaaatgaaagccaatatccacaatagcttctgcgcacggtttctgttcaatacgatcggccaacagcgtagcggcgcgctggccaatggcgcgtctgtcaacgcttacggtagtaattgacggtcgattgctggcggcaaaatcaaggtcgccaaaaccaataaccgctaaatcatgcgggatgcgcaaaccacggctttccgcctccatcatcgccccctgggccagggtatcagaactgcaaacaatgacatcaaacgtcccttcgtcaaaaagctggcttaaaccgctgcgccccagcgaaagcgatgccggaagggggacatctacctgcggtacggcatgaatagcgtggcgttgaagaacactacataacccctgcttacgttgcgcggctcggcgatcggcggtccacaacaagccgggacgacgatagcccttactcaaaagatactcccccgtcgcctgcccgactttttcatgggaaaaaccgaccagcatatcaagcggcgtgggcgttaagtcccaaatttccaccaccggaatagccgcgttcaggatgacctttttcagttctatcgtgtgatggatcccggtaagcaccacgccatcggggcggcgggaaagcagtgtcgccaccaactccgcttccgtttgttcggtatatcccgccacgcacagcaatatgtgatatccgcgtcgggccagttcatcgctcagtgactggatggtatcgacaaacatgttgttgttaatttgcggcacgacgacagcgattaatttactccgtcgcgacgccagaccaccggctaacgcgttgggtatgtagcctgtgacgcgaaccgcctgcatgactttctcaaccgttttggggcgaaccagttgtggcgaattcaatgcccggctgactgtcatcggagacagcccggcgctacgtgctacatcttccagcgtcggcgcacgaggtgatttggttctcttcacgtctgatgcccctgcaaagattggctgatttatccgcgcattattcatcatgcctgcggctattgccagcttcgcatcaggaaaggccgtaaatacagtagcttatcaagctcagtcattacaaaatgatagcgccatcattttgtattatgcatttccccagatatttttggatcgtgatccattttgcaataaatcctgctttttatacgacatatgtgatcaaatgttcaaatcaacatcaactttctggatcctgcgttcgcttaataataaaaatgttagcgcaatcattttgtgattatcaggagaaaaaaatggctttaagcgcgaattccgacgccgtaacgtatgcaaaagcggcgaataccagaaccgcggcagaaaccggcgatcgtatcgaatgggtgaagctatcactggcttttctaccgctggcgacgccagtgagtgacgcgaaggtactgaccgggcgccagaaacctttgaccgaagtggcaatcatcattgccgaaatccgcagtcgcgacggctttgagggcgttggttttagctactccaaacgtgctggcggccagggtatttatgctcacgccaaagagatagccgataatctactgggcgaagatcccaatgatatcgacaaaatatacaccaagctgctgtgggccggagcctcggtggggcgtagcgggatggcggtacaggctatctcccctatcgatatcgccctatgggatatgaaggctaaacgtgccggtctgccactggcaaaactgttgggcgcgcaccgcgactccgttcagtgttacaacacctcaggggggttcttgcatacaccgctcgatcaagtgctgaaaaatgtggtgatttcccgcgaaaatggcattggcggtattaagttgaaagtcggacaacccaactgcgctgaggatattcgccgcttaaccgcagtacgtgaagcgcttggggatgagttcccgttaatggttgacgctaaccagcagtgggatcgcgaaacggctatccgcatggggcgtaaaatggaacagttcaatcttatctggattgaagaaccattagatgcctacgacattgaaggccacgcccagcttgccgccgcgctggatacgcctatcgccaccggggaaatgctgaccagtttccgggaacacgagcagttgattctgggcaatgccagcgatttcgttcagccagatgcgccgcgtgtcggcggtatctctccgttcctgaagattatggatctggcggcgaaacacgggcgtaagctggcgccgcactttgcgatggaagtacacctgcacctttccgcagcgtatcccctggagccgtggctggaacatttcgagtggctgaacccattattcaacgagcaacttgagctgcgcgatggccgcatgtggatttccgatcgtcatggtctgggtttcacgctcagtgaacaagcgcgccgctggacacaattaacatgtgaatttggcaaacgcccttaacccgactggcgggaatccgtcccgcctctcttaccttacaggatgcattctgcccttatctgaggagtagataatgaacacaataataaagcgcacaaaagtgcgtcataccattcttatatttttatttcttgctaccgtatttaattatgcggatcgcgcaactctatccgtagttgccccaataatgaataaagaattaggttttgatccggaagcgatgggcctggccttctcctcatttggtattgcctatgtcattatgcaactacccggcggttggctattagaccgctacggttcacgactggtttacggttgcgcattgattggctggtcgttagtaaccatgtttcagggaacgatctatctgtatggcagcccattaattgtactggttattctacgtctgctgatgggcgcgattgaagcgcctgcctttccggcgaacagtcgtttaagcgtacaatggtttcccaataatgaacgaggtttcgttacttcagtttatcaggctgcgcaatatatctcgctgggcattatcaccccgctaatgacgatcattctgcataatttaagctggcattttgtcttctattatattggcgctattggcgtgatgctcggtatattctggttaatgaaagtcaaagatccgatgcaccatccaaaagttaatcaagcggaaattgactatattcgtagcggtggtggcgagccctctctgggctgtaaaaaggagccgcagaaaataacgttcgcgcagattaaaaccgtctgtgttaaccggatgatgatcggtgtttatatcgggcaattctgcgtcacctctatcacctggttcttcctgacctggttcccgacctatctgtaccaggcgaaaggcatgtcgattctgaaagtcggttttgtggccagtattccagccattgccggttttattggcggcctgctcggcggcgtgttctccgactggctactcaaacgcggctatagccttaccgtcgcgcggaaactgcctgttatctgcggtatgttgctctcttgcgtaattgtgatcgccaactacacctcttcagaatttgtggtcattgcggcgatgagtctggtcttttttgccaaagggtttggtaacctgggctggtgcgtactcagcgacacctcgccgaaggaagttctgggtattgccggcggcgtatttaacatgtgcggcaatatggcaagcatcgttacgccgctggtcatcggcgtgattcttgccaatactcagtcgttcgactttgccattttatacgttggctcgatgggacttattggtctcatttcatatctgtttatcgtcggcccgctggatcgcattacgctgacatcatccgcagcctgattgtccacattgcgaattcttcgctccgctgttccgggattgcactccatcggaacagcgttttttagttgtacctcgcaattcagatgccgtcgccatactcaaacgtatggtgtagcccgttgaaatgctggtccatatccatcgacggcttatcgctgcccggcttgccgacaatacgcgccggaacgcctgcggcggtagtgtgcggcgggacaggctgtaaaacgacggaacctgcgccaattttcgcgccgcgccccacctcgatattgccaagaattttcgcgcccgcgccaatcatcacgccttcgcggattttaggatgacgatcgccgctcgttttcccggtaccgcccagggtgacggattgcaagatcgacacatcatcttcaataaccgccgtctcccccaccacaataccggtggcatggtcgagcataatcccgcggccaattttcgctgccgggtgaatatccacctgaaacgagaccgaaacctgattttgcaggaagatagccagcgcgcggcgacctttattccacaaccagtgaccaatgcggtaggcctgtagcgcatgaaagcctttcagatataacagcggcgtggagtatttatccaccgccggatcgcgagtgcgcacggcctgaatatcgcaggctgccgacgcgatcatttccgggtcggcggcataggcttcttcaactacttcacggatagcgatagcgggcatgatgggcgaagccagtttatttgccagcatatagctcagcgcactgcccagattttcatgcttgagtagcgtggcgtgataaaaactggccaacataggctcacagtcagctaaagcgcgggcttcagctttaatattcttccagacgatttccagttcttcacacggcatggcttactccagacgggcagaaaacgaccaacccgttctgtgcgggttgggtcgtttatgcaaacagttccttacggctagtggcgactcagctcttccttgcgggcgcgacctaataacgttaatgctgcctcgcgcgcgttttttccgcaatacaatacttgataaatttcctcggttattggcatttcaacaccaaaacggtgcgccaattcacgaacttctttcgtattgcgatagccttcgaccacctggccaatcttatcctgcgcgcctttaacgtccatgccctggccaagcatcatgccaaaacgacggttgcgcgactggttgtcggtacaggtcagcaccagatcgcctaaacccgccatccccataaaggtggcgggatcggcaccaagcgctgcgccaagccgcgacatttcggtcagtccacgcgtgattagcgccgtgcgggcgttcgcgccgaagccgatgccgtcagacatccccgcgccaatcgcaatcacgtttttcaccgcgccgccaagctgcacgccgataaaatccgcattgatatagacgcgaaaactttttccgcagtgcaacagttgctggagatcgtcggcaaaggtctcatcggttgaggccagcgagattgccgtcggcaaacccgccgccagctctttagcgaacgtcggaccggaaatcaccgccagcgggatttgatcgcctaacgcctcgcgagcgacatcctgcaacaggcgccccgtttccgcttccaggcctttggtcgcccataccagacgcgcatccggacgcatcagcggtttaatctgccgcagcacgtcgctgaaaacatggcttggcaccaccaccagaatgttacgactggccgccagcgcggttgctaagtcgctttccaggtgtaacgtatcgggaaaaggcacatcgggaaggaacgcgacgttgcagcgatcgtgctccagggtcgcgatatgttttgggtcgtggccccacaggacaacctggtggccgtttctcgccagagtgatggcaagagcggtgccgtacgagccggcaccgatgactgtcattgacgcattactttggttcatcaggcatcctgatgttcttcagtaccttcgccagcctgctgctgcaaatagttcatgaacagcgcatcaaagttgaccggcgcaaggttcagttgcgggaacgtaccgcgtgaaaccaggctggtgatgcactcgcgagcatacgggaacagaatgttcgggcagtatgcacccaggcaatgcgccatctgagtaccttcaataccgctgatggagaaaataccggcctgctgaacttcgcacaggaacgcggtttcttcccccagggaagccgttacggtaacacgcagcacaacttcataaacgtcatccgccagttgggaagatgccgtatcaagatccagtttaacctctggctgccaatctttctggaaaacatgcggtgcgtttggcgcttcgaaagaaacatccttggtatagatacgttggatctggaaagccatttcagtgttattttgttctgacatgtgtaaaaccctttagtgttgtccttaaatacttgagtacgccttaacgcaacagcggatccagtccaccacgcgcatccagcgcatacaagtcgtcacaaccgccaatgtgctgtgcatcaataaaaatttgcggaaccgtcgttcggccactacgtttgatcatctcttcacgcttcacggcgtcgccgtcaatcgcaatttcctggaaactcacgcccttgctgtttaacagcgcctttgcacgatggcaaaacgggcaggttgctttggtgtagatttcaatattggccatgacttcgctcctgtttttttacccgatggatttcatgtcgacgcaaaggcaagtcattccccttgcgccatgaaaacgacgggtaatcacttaccgcgcaccagaggcagattctcgccgctccagcctgctacgccttctttcaacacaaagaccttttcaaagccggcttttgtcagcgcgttagcggattcctggcactgcataccagaaccgtcgaccacgataatcggcttgtctttgtgcttttccagttcgccaacattgttggctttgatttcgctcggcagcaaattggtcgcgccagcgatatggcctttacggaaatcgtcacgttgacgtaaatccacaacaacggcgtcctctttgttgataaggcgcgtggcttcgccgcgtgtaatcaccttaacttttgaagtcagacctttgaacgtggtaaataaaaccgccaccagtaacgcaatccaggcgatactcagtatgggatgacggccaacaaattgcataatttcttgcatggggggtaacaactcccgacgtagtgattaaaaaaccaggaaaggagtatacctgcgcagtggcgcaaatacagccagagcgtgcactggaatgcatttttgcggggcgctacgaaaaaaaatcacgctattacttgccttctcacgccagcgcgatccctttctttgatcttctgaggctattttatcgattcagctgtagtaaaattacgcaattattttgtctattgagtatgaggttgtcgcaatgtcggtttctaaaaaacctatggtactggtgattctggatggctacggctaccgtgaagaacagcaggataacgctatcttaaacgccaaaaccccggtgatggatgctctgtgggcaaaacgtccgcataccctgatcgacgcatccggtctggaagtgggtctgcctgaccgccagatgggcaactccgaagtgggccacgttaacctgggcgcaggccgcatcgtttatcaggacctgacgcgtctggacgttgaaattaaagaacgtactttctttgctaacccagtcctgaccaatgcggtagaccaggcgaaaaacgccggtaaagcggttcatattatgggtctgctgtccgcgggcggcgtccacagccacgaagatcacattatggcgatggtggagctggccgcagagcgcggcgcagaaaaaatctatctgcacgccttcctcgatggtcgcgacacgccgccgcgcagcgctgaagcctcgctgaaaaaattcgaagacaaattcgccgcgctgggcaaaggccgcgtggcgtctatcgtcggtcgttactacgctatggaccgcgacaaccgttgggatcgcgtggaaaaagcgtatgatctgatgaccctggcgcagggcgaattccaggcagataccgctgtggctggcctgcaggccgcttacgctcgtgatgaaaacgatgagtttgtcaaagcgaccgttatccgcgccgagggccaggctgatgcggcgatggaagacggcgacacgctgattttcatgaacttccgcgctgaccgcgcgcgcgaaattacccgcgctttcgttaatgctgatttcgacggctttgcgcgtaagaaagtggttaatctgaacttcgtgatgctgaccgaatacgccgccgacatcaaaactgccgttgcctacccaccagcgtcgctggcgaatacctttggcgaatggatggcgaaaaacgacaaaactcagctgcgtatttccgaaacggaaaaatatgcgcacgtaacctttttctttaacggcggcgtagaagaaccgtttgctggcgaagagcgcattctgatcaactccccgaaagtggccacttatgacctgcaaccggaaatgagctctgcagaattgactgaaaaattggtcgcggcgatcgaaagcggtaagtacgacaccatcatttgtaactatccaaacggcgatatggtcggtcataccggcgtgatggaagccgccatcaaagcggtggaagcgttggataactgcattgaacaggtaacaaaagcggttgagtccgttggtggacaactgttgattaccgcggaccacggcaacgcggagcagatgcgcgatccggcgaccggtcaggcgcataccgcccacaccaacctgccggtgccgctgatttatgtcggcgagaaaaacgtgaaggcggttgaaggcggcaaactttcagacattgcgcctaccatgctgtcgctgatggggatggaaatcccgcaagagatgactggtaagccgctgttcatcgtggaataatccctccccatgaggggaaaggcgattaacaccattcaacaggccgtgaaactaaaaacgttttcagtcaggcctttgttctacgccagcgtacttagcgctggcgtattgttgtgcgccttttccgcccacgcggatgaccgtgatcaactcaaatctattcaggccgatatcgccgcgaaagaacgcgacgtacgccagcagcagcaacagcgcgccagcctcctggcacaactgaaagcccaggaagaggccatctcggccgcagcgcgtaagctgcgcgaaacgcaaagcactctggatcagttaaacgcgcaaattgatgagatgaacgcctcaattgccaaactggagcagcaaaaagccagccaggagcgtaatctcgccgcgcagttggacgccgctttccgccagggcgaacacaccggcattcagcttattcttagcggagaagagagccagcgtgggcaacgcctgcaggcctacttcggctatctgaaccaggcgcgccaggagactatcgccgaactgaagcagactcgcgaacaggtcgccacgcaaaaagccgagctggaagagaagcaaagccaacaacaaacgttgctgtatgagcagcgcgcccaacaggcgaagctggagcaggcgcgtaatgaacgtaagaaaacgcttgccggactggagtcgtctattcagcaaggccagcaacagttaagcgaactgcgcgccaacgaatcacgcctacgcaacagtatcgcgcgggcggaagcggcggccaaagcgcgagcggagcgtgaagcccgcgaagcgcaggcggtacgcgataagcagcaggaagcctcgcgtaaaggcagcacctataagccgacggaaagcgagcgttcgctaatgtcccgcaccggcggtctgggcgcgcctcgcggtcaggcatactggccggtacgcggcccgatattgcatcgctatggcgaacggctgcagggtgagctacgttggaaggggatggtgatcggcgcgtcggaaggcaccgaggtcaaagccatcgccgacggcagggtgattctggcggactggctgcaaggctatggcctggtggtggtcgtggagcatggtaaaggcgatatgagcctttacggctataatcagagcgcgctggtcagcgtaggcgcgcaggtacgcgccggacaacctatcgcccttgtgggcagtagcggcggtcagggcagaccttcgctttatttcgaaattcgtcgccagggtcaggccgtcaatccacagccgtggttgggaagataagttttgcctcagtttcgtcgctccattctcacgctggccactttgctggcgtttgcacatcccgttttcgctggcaagctcgccatcgtgattgatgattttggctatcgcccgcacacggaaaaccaggttctggcgctgccgccaaacatctccgtcgccgtactgcccaacgcgccgcacgcgcgcgaaatggcaactaaagcgcacaatagcgggcatgaggtgttaatccatctgccgatggcgccgctaagcaaacagccgctggagaaggatacgctgcgaccagatatgagcagcgatgagatcgagcgcattatccgcgaggcggtaaacaacgtgccgtatgccgtcgggcttaataaccacatgggcagcgcaatgacctccagcctgttcggtatgcaaaaagttatgcaggcgctggaacattacaatctctattttctcgacagcatgacgattggcaatagccaggcgatgcgcgcggcatccggtacgggtgtgaaagtgatcaagcgtaaagtgttcctcgacgatacgcaaaacgaggcggatatccgccgtcagtttaatcgcgctatcgaactggcccgtcgcaacggttccgctatcgcgattggtcatccgcatcccgcaacggttcgcgtgctgcaacagatggtttatcgcctgccggcggatatcaccctggtacgtccaggcagcctgctcaacgaaccgcaggtagatacgtcccgacctggtgtgacgccgcagaaaattgacgcgccgcgcaatcccttccgcggcgtgaagatgtgcaagccgaaaaaaccgctgcaaccggtctacgctacgcgctttttcagcgtcatcggcgagagcattacgcaaagttccgtggttgtctggtttcagcaccagtggcaaggctgggggaaaatcgccgcgcctaaaaacgtgagcgctaagacagattgagcgccttacgggccatacgacggtgtgacaaggttttgtcgcgccattgccacagccggaaagaccagagcagcgtctgataagccgctttcgcgctgcggacgttagccatcatccgtctatacatgccagaagtaaaaatttcggcaatcatacgctggcgggtcaaaatatcaggctctttacgtaccgcatgacaaacgcgtaacgcttcccaggtaatttgctggcgaaactccgggtaaatcggaatacgccgggcataatcacgattgagcttttctaataaccgcgtaattttaatataatgccgctgataattaagatttttactgccttgtctttgcaaacggcttaccgaattatcatgcaggaaatatttatataatgattgttcggtataacgtacgcgcgtggcattaaacataacttccgtcgaccataatatgtcctgatgatgtagtccgggaacgaaagtaatattgttatcggtaattaacgcacgtcgataaacgcccatccagacaacatgcgtccagcgccgcgaggccaacgccatacgcaaccaatccggtccgcttaataccccggtggagcgcaggcgatcggtcggaatagattgccaggcgtgcccggtttttcggacgcaccagtccgcgttgcactgcgcaacgtccagatcatcgttaagcgccatggtcatcagcgtttcatacatcttcgggtagaccaggtcatctgcatcgacaaaggcgacataatcgccggtcgctgcttgcaggccaagattacgggcgacagatgcgccagcattggcctgatgaagcagtcgaacatgcgggtaatgttccgcgtaatgttttgctatctcaacggaatgatccgtcgatccatcattcacaataataatttccagcgccgaccacgtttgcgcgattaatgacgccatgcaagcattaaaatccgctcccgcattatataacgggacaatgatactcactttggttttactatttttcataacgattaccagaaaaaccttaatttaccctgcctttatactgtggctctattaagaaactattaagccgccataattaatttttacagtaaaaagcaagcacaaaactcagagtagagcgttacgttagcgagtaaaataagagtaaagcgcaattacgaatgcttgatgtctatgacaattctttacggctttccagattttccctaacaaaaaaggttggcgaatgacaccaaccttttacgatgaaacgtatatcagacccgataaatatcatcgggtctctatacatattaatcccagctcagaataacttttcctgactggcctgaacgcatggcgtcaaaacctttctggaaatcatcaatagagaaacgatgggtgataatcggtgacaaatccagaccggactggatcagcgccgccattttgtaccacgtttcgaacatctcacgaccataaatacctttaatgaacaagcccttaaagataacttttgtccagtcgatagacatatctgatggcggaatccccagcatcgcaatacgaccgccgtgattcatagtgtccagcatggtacgaaacgccggcggcgcgccggacatctccagacccacatcgaatccttcggtcattcccagctccgccatgacgtcgttcaggctctctttcgcgacgttgaccgcgcgggtgacgcccattttgcgcgccagctccagacggtattcattgacgtcagtaatcaccacatgacgcgcgccaacatgtttcgccaccgcggcggccattacgccgattggccccgcccccgataccagtacatcttcgccgacaagatcgaaagacagcgccgtatgcaccgcattaccaaacgggtcgaaaatagaggctaaatcatcagaaatgttatccgggattttaaacgcattgaacgccgggatgaccagatattccgcgaagcagccgggacggttgacgcccacgccggtggtgttgcgacacaggtgagtacgaccaccacggcagttgcggcaatgaccgcaggtgatatgaccttcgccggagacgcgatcgccgattttaaagcctttcacttcctgaccgatgccgaccacttcgccgacatattcatgccccacgaccatcggaaccgggatggttttttgcgaccagtcatcccagttatagatgtgaacgtcagtaccgcagatggctgttttacggattttaatcagcaaatcgttatggccgacttccggttccggaacgtcggtcatccagatgccctcttccgctttcagtttggataacgctttcatcttacatcctcaggcaatcacgcccagttgtttaccaatacgcgtgaacgcgtctaccgcacgcgtaatttgctcaggcgtatgcgccgcagacatctgggtacgaatacgcgcctgaccttttggtacgaccggatagaagaaaccggtaacgtaaatgccctctttttgcagttcgcgggcaaatttctgcgcgacaaccgcatctcccagcattaccgggatgatggcgtgatccgcgcctgccagcgtaaatcccgcggcagacatctgctcacggaactgccgggcgttcgcccacaagcgatcgcgcagttctgcgcccgcttccaccatctccaacactttaatagaagccgccacgattgccggcgccagggagttggagaacagatatgggcgggaacgctgacgcaaccactcaacgacctctttacgcgccgcggtataaccgccggatgcgccgcctaacgctttgcccagcgtaccggtaataatatctacgcggcccattacgtcgcagtattcatgggaaccgcgaccgttttcgccgacaaagcctaccgcgtgagaatcatcaaccatcaccagcgcatcgtatttatcggccagatcacagacgcctttcagattggcgatgacgccatccattgagaacaccccgtcggtggcgatcaggacatgacgcgcgccggcctcacgcgcctctttcagccgcgcttccagctctgccatatcgttgttggcatagcgatagcgcttcgctttacacaaacgcacgccgtcaatgatagacgcgtggttcagcgcgtcggagataatggcgtcttccgcgcccagcaacgtctcaaacaagccgccgttagcgtcgaaacaggaggaatacagaatcgcatcttccatgccgaggaagcttgccagcttttgctccagcgctttgtggctgtcctgggtgccgcagataaaacgcacggacgccataccgaaaccgtggctgtccatacccgcttttgcggcattaatcagctcagggtgattcgccagcccgagatagttattggcgcaaaagttaataacgtggcttccatccgccacggtgatatccgcctgctgcgcagacgtaataatgcgctcttctttaaacaatccttccgcccgggcggtttccagatcgttggttaactgtttgtaaaaatccccacgcattgcgattctccagactgggcaaatttcagcacatattacccaaagcgatacgttgatacgagatgacgcgtcatcacttctttaaaatgcagcataaatcacgcgtatcctcacgggttatcagtgaatggatgaatagtgttatgataagagcattcatgtctgagacagtctctgacaccataattcaaaggttacagttatgatcatcgttaccggcggcgcgggctttatcggcagcaatatcgttaaggccctgaatgataaaggtatcaccgatattctggtggtggataacctgaaagacggcaccaagtttgtaaacctggtggatctgaacattgctgactatatggataaggaagatttcctgatccagattatgtccggagaagagctcggcgatatcgaagctattttccatgaaggcgcctgctcttccaccaccgagtgggacggcaagtatatgatggataataactatcaatactccaaagagctcctgcactattgtcttgaacgcgaaatcccgttcctctacgcctcttctgccgccacctatggcggtcgcacgtctgatttcatcgaatcgcgcgaatacgaaaaaccgcttaacgtttacggctattctaaattcctgtttgatgaatatgtgcgccagatcctgccagaagcgaactcgcagattgtcggtttccgctatttcaacgtctatggaccacgtgaaggccataaaggcagcatggcaagcgtggcatttcatctgaatacacagttaaacaacggcgaaagcccgaaactgtttgaaggcagcgaaaacttcaagcgcgacttcgtttacgtgggcgatgtggccgccgttaacctgtggttcctggaaagcggcaagtccggcatctttaacctgggcacaggccgtgcggaatctttccaggccgtcgccgacgcgacgctggcataccataaaaaaagcagcattgaatacattccgttcccggataagctgaaaggtcgctatcaggcgtttacgcaggcggatttaaccaatctgcgcaacgcgggctacgacaaaccctttaagaccgtcgccgaaggcgtcacggagtatatggcctggctgaaccgcgacgcgtaagtatgaaaattttggtcattggcccgtcctgggtgggcgacatgatgatgtcgcaaagtctctatcgcacgcttaaagcgcgctatccccaggcgataatcgacgtgatggcgccagcctggtgtcgtccgttgttatcgcgtatgccggaagttaacgaggcgatacccatgccgctgggccacggcgcgctggaaatcggcgagcgccgtagattgggccatagcctgcgtgagaagcgctacgatcgcgcctgggtgctgccaaatacgtttaaatcggcgctggttcctttctttgccaatatcccgcaccgtaccggctggcgcggcgaaatgcgctatggcctgctgaacgatgcgcgcgtccttgataaagacgcctggccgctgatggtggagcgctacgtggcgctggcctatgacaagggggtgatgcgcacggcgaaagatctgccgcagccgctactctggccacagctcctggttagcgagggtgaaaagtcgttgatacgcagcgacttttcgctatcttctgaacgtcctctgatcggcttttgccccggcgcggaatttggcccggcaaaacgttggccgcactatcactacgccgaactggcaaagcagctcattaacgaagggtaccaggtcgtactgtttggctcggcaaaagaccatgaagccggaaatgagatcctggcggcgctgaatagcgagcagcaggcatggtgtcgcaacctggcgggggaaacccagctggaacaggccgtcattctgatagccgcctgtaaagccatcgtcaccaacgattccgggctgatgcacgtcgcggcggcgctcgaccgcccgctggtcgccttgtatggcccaagtagcccggatttcacgccaccgctgtctcataaggcccgggtgattcgtctcattacgggttatcacaaagtgcgtaaaggcgatacggcgcaaggctatcaccagagcctgatcgatatcacgccgcagcgggttctggaagagcttcattcgctgttgtcggaagagggcgtttaatgcgggttttgatcgttaaaacatcatcgatgggcgacgtattacataccctgcctgcgcttaccgacgcgcaacaggctattccagggattcaatttgactgggttgtcgaagaagggtttgcgcaaattccgtcctggcacagtgctgtcgatcgcgtgattcccgtcgctattcgccgttggcgcaaagcctggttttccgcgcccattaaagcggaacgcacagcctttcatcgggcggtatgcgcataccaatacgacgctgtgattgatgcgcaggggctggtgaaaagcgcggcgctggtgacgcgtctggcgcatgggataaagcacggtatggactggagtactgcccgcgaaccgctggccagcctgttttataaccgtaaacaccatatcgcaaagcaacaacatgcggttgagcggacgcgcgagctgttcgccaaaagcctgggatacgataaaccgcagtcgcagggcgattatgccatcgcaaaacattttctgcattgccagcaggcggtcagcgatccatatgcggtatttttacatgccacgacccgcgatgataaacactggccggaagcaaactggcgcgagcttatcggtatggtgggcaacaccggattacggataaaacttccctggggcgcgcctcatgaggaggcccgggctaaacgactggccgaaggctttgactatgtggatgtgttaccgcgcatgagcctggaggaggtcgccagagtgctggctggcgcaaaatttgtcgtatcggttgataccggcctgagccatctcaccgccgcgctcgacagaccgaatattacgctatatggcccaacggaccctgggttaattggaggttatgggaagaaccaaatggcatgctgctcaccagaaaaaaacctggcgaatttagatgccacaagcgtatttggaaagattcattaaagagacactgtctcatcccaaacctattgtggagaaaagatgctaaccacatcattaacgttaaataaagagaaatggaaaccgatctggaataaagcgctggtttttctttttgttgccacgtattttctggatggtattacgcgttataaacatttgataatcatacttatggttatcaccgcgatttatcaggtctcacgctcaccgaaaagtttcccccctcttttcaaaaatagcgtattttatagcgtagcagtattatcattaatccttgtttattccatactcatatcgccagatatgaaagaaagcttcaaggaatttgaaaatacggtactggagggtttcttattatatactttattaattcccgtactattaaaagatgaaacaaaagaaacggttgcgaaaatagtacttttctcctttttaacaagtttaggacttcgctgccttgcagagagtattctgtatatcgaggactataataaagggattatgccattcataagctatgcgcatcgacatatgtccgattccatggttttcttatttccagcattattgaatatttggctgtttagaaaaaatgcaattaagttggtttttttggtgcttagcgccatctaccttttctttatcctgggaaccctatcgcgaggggcatggttggcggtgcttatagtaggtgttctgtgggcaatactgaaccgccaatggaagttaataggagttggtgccattttattagccattatcggcgctttggttatcactcaacataataacaaaccagacccagaacatttactgtataaattacagcagacagatagctcatatcgttatactaacggaacccagggcaccgcgtggatactgattcaggaaaacccgatcaagggctacggctatggtaatgatgtgtatgatggtgtttataataaacgcgttgtcgattatccaacgtggacctttaaagaatctatcggtccgcataataccattctgtacatctggtttagtgcaggcatattgggtctggcgagcctggcctatttatatggcgctatcatcagggaaacagccagctctaccttcaggaaagtagagataagcccctacaatgctcatctcttgctatttttatctttcgtcggtttttatatcgttcgtggcaattttgaacaggtcgatattgctcaaattggtatcattactggttttctgttggcgctaagaaatagataaaaaaaacgcgctgatacttattacggtatcagcgcgttttccatcgtccggactcaatcacttatcaaaccagcttttcatctgttcctcgaaacgctgagctacattttcccaactgtattttgaaaacaccagggattttgctttttcggcaatctggtggcgttccttatcagcaagcgcacggttaatatcattaattatactgtcgctcgacataggttctgcgaggtgatagcccgttatgccatctaacacaaattcgctaatccccccttttttgctggcaagaaccgcttttcctgctgccatcgcttctacagccaccatgcaaaatgcttcttcaacctgagatggcacaataaccagatcggctatatgatagaagttatgcatctggtcaggagattgccccccagccataatacaatcagttccaatctcttttgcggcgtccagtactttcttttgatactctgctttttcacccttgcggcttgcataaggatcgccaacaacgacaagtttaatattacttcttaaggtacgtaattttttgaacgcctgcaaaagcaacaggatgcctttatcaggcgaaattctcccggcatataagagaacggtggcatcttccgcaatatttaattgctgacggaggttattttgtgggtttcttttataagtctcagcacaaaaaccattaggcacaatactaacagcagcggcgggcaatctttcttcataaaacgctttaagaaactgactgggcacgataatttttgcatccttatcaggaagttctggttcaaatgcgttatgcatgtgcataaccagttttgcattcggattgcgctctctgatctgccgatacagtttcatactattatgaataacaatgacgctatcttcctgggtagtcactttatctctaatattaaggacgcgctgggaatagggtagtgggtcgagacgagtccatttctgaaaaagacgcttataaactttactaaacccgatgtaatgaatatcacagttatcgtttattttattatattcaggatagccagcattctttatacaagcaatagcattcggtattgatagtcgttttgcaacctggtaaatccaggtttctaccgcagccgcgccacgtggaggaattgaaaatataggagtaacagtaaatatgatttttttaatcataatagctataatccagaatagttaactttatagaaaaagaaatgttatagaaaaagaaatgcgtgccgaagcaactcaaaataatgatgtatctagtgtctagacaattttatcgtaatatatttcatcctcaagttccgaggctgtaatatatggaataatatcgtaatgaattgcagtatcatctgataaattaaagatatttaaatcactcacattttttctcataaaagtaaaaaatggcagtattttaaacaggtctttactaagctcagatggcatagggctggtagattcgtcatagaaacgtgggcaactccctgttaagtcaagcccagaacatataatacggccatacttgagggaataagcaacctgaatagcggtataagcaatagtatggcaagagcaatacccgatgctgatatccttgcaaaatccagccagtcgccctcttttcgaaaggggaactgaaataagtaatgctttatgaacccgcttgaggatattaaatttaattttctttaaaaagccccctttttctcggcgataaaaggagcgaataattaaacagttttcttcaatatatttttgatcatccactgaagcctgttcgtacacatcaagattgacgatagtaaactgactgttacggctaaagttataaaaatcttcgcgccggcgatggaggaagcgaacatccgtcagaaggtacaaaaatggcttgacgttattgtttagcaaatattgaacagaaccattgactgcaatgacatctttcattcgtaacaaggacagcggcgtctttctggacgtaggaccagaaagaaaaataatacaatcttcagccgttcttttcgcaataagttgcagaacatcggcgtgagttatgaagttaacgctgcccataaaaaactcgtatttttatcatgcaacctataaataaatgttatattcaataactaatattacatctcaaattctctcaagtatgtcataacgctgcagcaaataaaagtcagtcagtcccttaaattaaaccaaacgtgctacattgatcagcgcttttccttacccttaatacgacgcaagaaatttcgaagttttttcttataaatcaataagtaaaatccgatatctctcacattatttttgataccataatgtctttctaaatcaatacgatcctttgcttttcgttgtctggaaggtctttttccggacaaatcgataattctgatctcattgccttgcaggataaagttacctttatggggatcgcccgaaaccataccatgctgatgcagagaatatatcgactgtttgattttccctctcacctcgtcagaaatttctggcatatcaacaagttcaataccttcaatatactcaattatcatcacgtatgtttttacatagcgtaatgttttaatttccgccagcaggtaaaaatcattaagcgccgtaaacccttctcgccgaacacgatctgtctgatgaaaaagcttttcgtagtaatctccttttactaacgatttgaaaaatcgttcagtattttttacttttggactaaataccttgagaatatattttccgtagtctgtattaatcaatacaacttttgtatcttctatattacggaagactttaataacctgatgattataagatagaaaatctttgaatatctcaatgtatttttcaccgtcttttttgacaaagacggtatagtttttaatctttttttcaataatcataatagagatttaggcaggggaattatttgtggaaaagtttacgataaagatatgcgcttccagccataaggcctttaaaataatgaccctgcacgagaagatgtttatatcgcttcttaaattcgactatggtacgcgcatcttttgcaggagaatctttccagggcgagttcagtcgtgcatttttataatagataactgaaggataatttgcccaggcatgccatggttttgtagcgcccgtataatgaattaaaacagtattatcattaattatattgctatattttttatgtgacttatctttcaactcacttttgatagtataaatggtattatatggtcgcggtagaaaaatgactttatcctgtaggagaatattcaaaacatcctgatcgggatatttaaaagagtcagcctctttacctgccaaaagtaaaaatgcctttttggttaaggcattctctttccataatttcaggttaacaaaaaccacgccggagttaaaataaccaccttgtaaattaaaagcgcttaatctctcatttaccttattctggatggaatcaacatcttttacgaccgcagcaatcttctctgtcaaatcaagccgtagaagatcttgcaaagatcctttgcatacaacatcggcatccaaataaagtaaggtatttaccttcttgctgagataatcgaaagcaaataaacgaaaatacattgctctcgaccatactttagtttgaggcaatacctcaaggctttctactttaataagataaagagaaatttttatgtgatgctgtacggctaaacgctctatatattttacaaaacacggggagtatgaatcacaaataatgtgaaaagcgagcgggatattattgtttaatacaactgaagcgattgatacccccacaccatcaagatagttttcatcaacaccataagaaatgtttaatacgttatcatcattattattattactttcatcaaaaactttatattcagctatttctatctcaggaaatgaatccattacatcacctatgggttttattcaagaagtttacgtttaaagtaggctatatagtaatttatacccgaagtataatgcttctgattaaacatatgctttgccgcataacgtaactgatggctagtgactggatttaaaagtgcacaatgagaccacggtgagttgctcttagcctgtaaaaaatattgtgacacagggtaagccccccaactatgccagggcttcgttggtccgatataatgaacaaatacagtctcagcatcgactggattaataactgaatcttttaattcatagttaagactaaattgtgtattaaactttttatcaacaaaacgcgctttattcactaacaatatatttaatacatcctgatcaaggtgcgttatgcgctgtactacctctggatcttttagcatttcaatcgctttcttagagatattttctgcggtccaaagaggtatgttaattaaaataaaaccggcattaaaatagccagaaaccagcccaggcgttgccaggctaaccgagcgcttagtccaccattccaactcgccttcagcaacgacagccgcaatctcattttcagcaaaattaagatcaataagttcctgaatactccccttacatgcaatatctgcatccagataaagtactctatctgttttatctgaaaaataatcggcgataatgaatctaaagtatgttgcataggtccagtttttggtactgggtagcgattttaagcgctcacagtcgattaggtaaacaacaatctgcgtagcgtactgttttgctaatgcctcaaatcgctgctggtcttcagagccaaagaaatcggtaaaaacatggaaagctaacgccttctctgggttagcgaggagaaccgatgcaatagagacaccacagccaaaaagaaagtttttatcaatcccataagctatattaaatttagcagcatcactatgttgtgcatagttataatctaaagtctgttgaatgacttcttcttcaaaatattttctgctcatagtgatcacttttgtaatttcgagaatattgcattattaaaatttttaaaatatagcacatcgtaaaatctctcaatcgtgccgggaataatatcatgctgatattttacttcaccagaaataacgcgattaaggtgtcctacaaaatcatctatagcacccggagtgtaaagctcaccattcaaaccgggtttaatcatatcgcgcgggccagacatacaatcagaactaatacacggaattccatatgacattgcttccagcagggtcataggaaatccctcaaacgcagaggtaagtagtaacgcggtgacattttttattttttgctgtacgacttgccacggcgcgctttgccaaccataccagatcacacgctgctcaataccaagctcccgactataggcctggcacttttcaaaatctgagccatcaccaataatatgtagctgccattcccctgtcgtacgagttaagccatcaaataaatctttaactcttttctgtccttcaaatttaagacgccctacatagagaaatacagcgggtttatcgcgctcaggcggcggcacaatgattgttttaatagagacaggattataaacgacgctaatattttgcgctgagataccccgtgccatcatctgttctttaataccactacttatggccagatgataatccgcgtacgttatacattctgcatgttttttatggtcgagcgaaaaatgcggccacgagaaaatagtgaactgtttaccacttttctttcgtgctttattggcataaagacatgagatgatatcaatacatatcacaatatccggtgacgtttctttcagccactgactaaaattataaacatgcttagctcgacgaagaaaacttaattttatatttgagaatgattgcgcatatttaatctcttttagccatgctttatccattttgtcattacgacaaaagaaaaacatttcacagttgattttcggagagctattttcaaacgtatggataacgttgctaataacggtttccatccctccaaaaccagataccgcttcgccaataaatgctattttcatatataccccagagttaaaaccttaatctaaagactttagatattaaatagcaaaaatagtaatataaccctatggagtaatttttacctgacatctctttttttgctttaaggcgtattcaatatctttattattttcgataatggaatatattgccacacctgctggcattataaaaccatgatcaaagcaaagagcaatgtccagtcctcttccaaaaaaatcatcatgttgaattatgtttttttggtttgaaatataacttttaatgtcagacattctgtctatccttgtctcactcataaattactcactgagtgcataattattataattacagattttttcttattgttctttctttaattcgagcggctttaacatccgcctggtgaatcaaccccgattctttttgcaaaatctctcgcaggggaagagagaaatactcacgcataaaccggaatatatctcgctgagtcaggccaatattcattgaagaaaaataaagcccaattaaatctttgtcacgccagcgaaggggaacacgctggcgtatctgcgcgcgatgcaggtcgattacggagatttttaaatcctcttcgcgaccagtgaaaggtaaatgcagaagaaagtggcaaatataacagtcgcgatggttaattcccccggcgtgcattttacgtaccatagtcgcaacacgcttaatgatcatccacttcacctgcgcgtccggtggattaacagcccagtcagcgcagtagtcttcaaggctaatggtaggcgttaaatcttcggtgataataaatgatgttctggttagcgggtttacgcctttttcaccaaaaccaacgccgtgcatcgtatcaacgcccagctcatgtagacgatgaatggcgtgccattctctgtcagcgcccagaacaggcatacgtaacgaaatcaggttcttcacaatttctttcagcgaagtacctttatgccacttcaggaagtagcttttaccgtccagctcaaaccgcaatgttcgacgcgtctccagctctctgaacacttcgccctgtaacgtttttacttcctcaaaagcatctttaccgcgccatagtgtggttaacggcgctttcagctcaaccatctaaatcacctgtaataatatccgcggccttctccggtaagctgtataaatcctgggtatcagcataataccgcgcattttcagcccaggcgttgcgtaaggaaggctgtgtcagcgctttgagtaaaacctcatttagcgcatcctggcggaatggttcagtcatcgcttcgccacagtttgcatccacaatataatgtgcataaccgcacaccgcggttgtcagcaccggcaaaccagcagtaatggcttccagcaaaacaataccagcagcttcctgataggctggatgcagtaaaaggtcggctgccgccattaactccgcgatatcattacgtccggagaaaaaatgcacattcgtgccgacgccgcttctttcagccagtgctgcaaacttcttcggcttatcctgcccgacaacatagagcaccgtattttgccgtaaagattcgggtagcgatgccagcgcttcaatagagcgatccacacctttacgggtaaagtcagaccctacttgcaacagtaatttttgctgttctgagataccatttttctgacgataaatttgacgactgtttgggatctgttggctatattttctgtccgggtaaatccccggaggaagaatatggaaacgctccgcttcagtctgataatgtttttggaagtcagcaatctgcttattcgtcagcattaatagttgcgtcggcttgccgtgttcaaacgtggcgcgttcaaaagcagcataatgccgatagcgtgatgtcaggcgatagaaaaatcctttttcctgtgcgactttttcggcgtaacacacgtctgcggcgtaatacacatcaaggcccggcatcttattgaatccaaccacccgatcgacagggtggtcgcgcaaatggtgttgcacccaggcataatattctgcgttacgaccgtggttcgtccgggatttaaccggcacgcggattaattcaaagttatccgggcattccccttcccatgactgagtataaacacgaacctgatgacctcgcgccgccacggtttgagcaatacgcataaaatcacgctgcagaccgccaaaaggaaaatatttatataagcaaaaggcaactctcatagcaggctgtccaaatctatggggcgtgcctcatgcggcagcattttttccgtcgcggcgataacatcttcagccggaatcacggaaaggtattttttattacgatcaagctcatgccgttcaggcatcggctgataatttcctgcccaaaactgaatgatgtcgtcggtccagggacgccagaatacatgatccgtcgcgccaaaaagacaaatgaccggcgttttgactgctgcggcaatatgaccgggggccgaatcaacgccgataaagagatccgcatggtcaatcaatgcgcccaattcaggaaagcgagttttacccgccagaccagtaaccggttttgtctcacagccgcgtgcaatagcatccacgcaggccatctcgtctgcggccgggcctgacgtcagtacaacctgataaccgcggcgctgcacggcatcaataacctgcgagaatttatcattatcccagcacttaaatagctgccgtgccgtaggctgaataacaacatattgtcgggtcacaccaagttgtttgagctgttgtcgcatgttttcccaatgttccgggcgatagctcatggtggtttccgtgacatactgttttagcgctaacggctttagcgcggataatgtgcgctcaacagcatgttctcccgcataaggtactaaatgcgtaaagctctttttccataaagcagactgacgattaccgaaatcctgcgagatttttatttttgcgtttaaaaaacgcacaataagcgccacgctccactgatcggtgagattgacgaccagatcatacgagttagcacgcaattttttgattagcgatagcgcgtttttgatcttctcttttgttcctgcgcctttgttactgatgccgtagagtgcattaatctccggattttccgacaatatcggtatggtgttctggtaaagaagcacatcgatttttgcatcgggataattctgcttcagcgtgctgatgacaggggtggtaagtaacatgtctccatgaaaacgcatttttataatcagaattcttcgaaatggcttttccacaagcgactctttggttgaaattgtccggataaataagcagaaaaaagcacgctaccgccccaggcttcacagcaacccgatggctaataccgcactcattttagatgcgctagtgtaacacttctttcgcagcaatccgatacgaataatttttatacacaatcatttttttaatcataaattcaaagagatattaatttatccctctcttgtgaatggtcattcccattgtctggggcgacaagggcggcaaatttcaatggattgcgtaaaaatgcaaaaataatggggttcagcgcctggaatcctcgcttctgagccaatttggcgcaaaaatgggaaaagtaatggtaaagcccaggctaaatacatagaatccccagcacatccataagtcagctatttactatgctcgaattgctttacaccgctcttctctaccttattcagcctctgatctggatacggctttgggtgcgtggacgtaaagcgccggcctatcgtaaacgctggggtgaacgctacggattctaccgccgtccgttgaaaccgggcggaatcatgctgcattccgtctcggtgggcgaaactctggcggccatcccattggtccgcgctctacgtcatcgctatcccgatctgcctattaccgtaacgaccatgacgccgaccggctcggagcgcgtccagtccgcctttggcaacgatgttcagcacgtttacttgccttatgatttgcccgatgcgctcaatcgtttcctcaataagattgatcctaagctggtattgatcatggagactgagctctggccaaatctgattgctgcgctgcacaaacgtcatattccgctggttatcgctaatgcgcggctttccgcccgctccgccgcgggttatgcgaagcttggcaagtttgtccgtacgctcttgcgccgtatcaccctgattgccgcgcaaaacgaagaagatggcgaacgctttgtggcattgggcgcgaagaacaatcaggtcacggtcaccggcagtctgaaatttgatatttcagttacgccgcagctggcggctaaagccgttacgctacgccgccagtgggcgccgcaccgtccggtctggattgccaccagcacccacgatggcgaagagagtatcgttatcgccgctcaccaggcgttattacatcaattcccgaatttattactgattctggtgccccgccatccggagcgtttcccggatgctatcaatcttgtgcgtcaggcagggttaagctacatcactcgttcttcgggcgaagtaccgtccgccagcacccaggtcgtggtaggcgataccatgggcgaattaatgttgctctatggcattgccgatctcgcctttgttggtggttcgctggttgaacgcggcggtcataacccgctggaggccgccgctcatgcgattccggtactgatgggtccgcatacctttaactttaaagatatttgcgcccgtctggatcaggcgagcggacttatcacgattaccgatgcggctacgctggcaaaagaagtttcctctttactgaccgacgctgattatcgtaatttctacggacgtcacgcagttgaagtgctgtatcaaaatcagggcgcgctccagcgtctgctgcaactgctggaaccttatctgccaccgaaaacgcattgaggactgtcatgcaaaaacgggcgatttatccaggtacgtttgatccgattactaacggtcatctcgatattgtgacgcgcgcaacgcagatgttcgaccatgtcattctggccatcgccgccagccccggcaagaaacccatgttcaccctggacgaacgtgtggcgctggcgcaaaaagcgaccgcacacctgggtaacgtagaggtggtgggctttagcgacctgatggccaatttcgcccgcgacagacaggcgaatatcctgattcgtggtctgcgcgcggtggcggattttgaatatgaaatgcagttggcgcatatgaatcgccatctgatgccgcaactggaaagcgttttcctgatgccgtccaaagagtggtcgtttatttcatcgtcgctggtcaaagaagtggcgcgccatcagggcgatgtgacccactttctgccggacaatgtgcatcaggcgctaatggataagttgaaataagtttccttccctgccgggcctggcgttttacttctgacagtgacggcaatagaacgtcgcacgctgtgcgtgtttcgttgcgactatcggcgtaccgcatacccgacacggctcgcctttgcgcccgtacacctgcaactcctgcgcaaaatagcccggtttcccatcgctttgcagaaaatccttcagcgttgtcccgccttgttcaatagagcgcagcaaaacggctttaatcacccgtgccagcaggtcgcactcctctgtcgagagtgacgacgccaggcggtcagggtgaataccagcggcaaacagcgactcgctggcgtagatattccccacgccgaccaccagcttgttatccatcagccagggtttaatcgccgtcttcttcttcgcgcatttctgctgcaaatattcgccattaaactcatcgcttagcggctccggtcccagatgcgccagtacgttatgcccttccagctctttggtccataaccaggcgccaaagcggcgaggatcggtataacgtagaattttgccgttgctcatcaccaaatcgacatggtcgtgcttttccgccggcagcgcttccgacaatatccgcaagcttcccgacatccccaggtgaataattatccagccgtcaggcagctccagcagtaaatatttagcacgacgctgaacgctaaggacgggtgtatcgctcagacgataaatttcgtctgaaaccggccagcgcagacggccgttacggatatgggcgtgcaggatagtagcgccaactaaatggggttcaataccccggcggctggtttcaacttcgggtaattcaggcataacgtctccggctgtgtggcaggtctcattaatatggggacggccagaaaacaaaaaaccccgccgaagcgaggtttttgttacatcaaagcgagaattatttgattttcgcttctttgtagatcacgtgctgacggacaactggatcgaattttttcagttccagtttttccggtttagtacgtttgttcttcgtagtggtatagaagtgaccagtaccagcagaagaaaccagcttgattttctcacgaatacctttagccatgatttatttcctcttagtacttagtacttttcgccacgggcacgcagttcagacagaactgtttcgatgccttttttatcgatgatacgcatacctttagcagatacacgcagggtgacaaaacgcttctcgctctcaacccagaaacggtgagagtgcaggttaggcaggaaacggcgtttagtcgcgttcagtgcgtgggaacggttgttaccggtcaccggacgcttgccagtaacttggcagactcgggacatgtctattctccaaaaatcaaattagctcgagcttcgtatggggtatcggcgcctcgtcaggctttacagcctggtcatcgcgcagttctattgaactctcgattgccaggcccaaatgccaaacccgagattctcaaaggtggcgtagtatacgctgacccggcgatatgctcaagtcccgaacagacaaagatcccgatggatcgcgcaaagaatcttaaatccagccgcgttcggcaaaagaaacgtactctccgcgcccaattatcaggtgatcgagcacccggatatccataaactggcaacactttatcacgcgctcagtgataagtttatctgctttacttggctctgcgcagcctgaagggtggttatgcgccagaatgaccgctgaagcattgagtttaatcgcttcccgaacaatctcacgcggatgcacctctacgtggttaagcgtgccggaaaacaggcggctgtgctgaagcacccggtgctgggcatctaggaagatcaccagaaagatctcacgctcttcgcccgtcagttggctttgcagaaattcccgcgtcatttccggactcagcaacgcactttcctcattcatgcgcacgctgtaatagcgccttgccagctcagcaatgcctttcaactgcgcgaatttcgccaggccgatgccgtttacgccgcgaaactgcgcaaagtccgccgacagcaggccatacagcgacccaaagtgctgcaatatctcttttgccaacgtcataacatcttttcccggcgtgccggtacgtaaaaaaagcgccagcagctccacgtcgctgagggaagcaatgccggatctgagcattttttcacgcggtaataattcgtccaacgtatccatacgcgcacctccttttttaaggaagcggcatagtggcacagcctttgggagagatcgacgccccgattttgctcttgcgtagcgcctcgcaaagtggagcgcaggcaaagacacgacgccgtagagattgtgataaaatagccgcctttcaaagtcacccaacaggaaagacatgatgagcctggccggtaaaaaaattgttctcggcgttagcggcggtatcgctgcgtataaaacgccggagctggtgcgccgtttacgtgagcgcggcgctgacgtgcgcgtggcaatgaccgaggcggcaaaagcctttattacccccctgagcttacaggcagtgtcgggctatcccgtatccgacagtctgcttgaccctgccgccgaagccgcgatggggcatatcgagttggggaaatgggccgacctggtgattcttgctcccgcgaccgccgatctgatcgcccgtgtagcatcgggtatggctaatgatttagtctccaccatctgcctggcgacgccagccccggtggccgtgcttccggccatgaaccaacagatgtaccgcgctgccgccacgcaacataatctggaggtgctcgcctctcgcggcctgttcatttgggggccggatagcggcagtcaggcgtgcggcgacgtaggcccaggccgaatgctggacccattagttatcgttgataaggccgccgcgcaaatcgctgccgtcaacgatttgcgacatattaatatcatgattacggcaggcccgacgcgcgaaccgctcgacccggtgcgttatatttccaaccacagctccggtaaaatgggcttcgctattgcggcggccgccgcgcgtcgcggcgcaaatgtcacgctggtctccggtcccgtttcgttaccgacgccgccttttgtaaaacgggttgatgtcataaccgcgctggacatggaagccgctgttcaggccgccgttcaacagcagcatattttcattagctgcgccgccgtggctgactatcgcgcagagactattgccagtgaaaaaatcaaaaaacaggcggcgcaaagtgatgaattaataataaaaatggtcaaaaacccggacattgtcgccggggtggccgcactcagtgacaatcgcccctacgttgttgggtttgccgcggaaacgaataatgtggaagaatacgcccggcaaaaacgtatccgtaagaaccttgacctgatttgtgcaaatgatgtttctctttcaaatcagggatttaatagcgataaaaacgctttacaccttttctggcaggatggagataaagtcttaccgcttgagcggaaagaactcctgggccaattattactcgacgagatcgtgacccgttatgatgaaaaaaatcgacgttaagattctggacccgcgtgttggtcagcagtttccgctgccgacttatgctacttctggttctgccgggcttgacctgcgcgcctgtctcgacgacgccgtagaactggcgcctggcgcaacgacgttggtacctaccggactggccattcatatcgccgatccatcactggcggcagtcatgttgccgcgttcgggcctgggccataaacatggtatcgtgctgggcaacctggtcgggctgattgattccgattatcaggggcaactgatggtttcgatctggaaccgtggtcaggacagttttaccattgaaccgggcgaacgtatcgcgcaaatggtgtttgttccggtcgttcaggccgaatttaatctggtggaagcatttgacgccaccgaacgtggcgagggcggcttcggtcattctggccgtaagtaaattttacgcatccccataacgtcataatactgccgcaagcgctgagtttgcggttatagcgtgggtgctcgcctggcaagtgcttattttcaggggtattttgtaacatggcagaaaaacaaactgcgaaaaggaatcgtcgcgaagaaatacttcagtcactggcgctgatgcttgaatccagcgatggaagccaacgcatcacgacggcaaaactggcggcctcggtcggcgtttccgaagcggcgctataccgccattttcccagcaagacccgcatgttcgatagcctgattgagtttatcgaagatagtctgattacccgtatcaatctgattttaaaagatgaaaaaaacaccagcacgcgtttgcgcctgattgtgttgctgattctgggttttggcgaacgcaaccctggcctgacgcgcattcttaccgggcacgcgctgatgtttgaacaggatcgcctgcaggggcgcattaatcagctttttgaacgcatcgaagcgcagctccgccaggtgctacgagaaaaaagaatgcgtgaaggcgaaggctacacgacggatgaaaatctgctggcaagccaactgttagccttctgtgaagggatgctttcacggttcgtacgtagcgaatttaaataccgcccaacggacgatttcgacgcccgctggccgctcattgccgctcagctacagtaacgctgactggatagtggctcacgccttatccaggcgacagaaacataagcccggtaaagcgccaccgggcaattcgcttacacgccaaattcttcccggtatgctcgcacagccgccagatgctcagccatatcaggtttttcttccagataggcaatcaggtctttcagcgtaatgatggagataaccttacaaccatagtcgcgctccacttcctgaatcgcggaaatctcgccgcggccacgttcctgacgatccagcgaaatcagtacgccagccagcgtagccccgtgcgcctgaataatctccatcgactcgcgaatcgccgtacctgcggtaatcacgtcatccaccagcatcacgcggccctgtagcgcgctgcccaccagactcccgccttcgccatgatcttttgcctctttgcggttaaagcagtacggcaggtctttatcgtgatgttccgccagcgcaaccgccgtcgtcgtcgcgatcggaatacctttgtacgcggggccaaacagcagatcaaattcaataccggaatccaccagcgcttcggcataaaaacggcctaacaacgccaggtcgcgcccggtattaaacagcccggcgttgaagaaataggggcttttgcgcccggatttcagcgtaaactcgccaaactttagtacctgcttgttaagcgcaaactcaataaactggcgctgatacggtttcatggattcgctccttttcttactttcatcatttacgaaatttacggacaaaaaaaaggcgacttttcagtcgccttaaaatcaattttctagcgccgccttctgcgtcgccacaatggattcaattccccctcgggccagcgccaacaaagtgagaagttcttcatggctgaacggctcgccttccgcggtaccctgtacttcaataatgcggccgtcttcagtcatcacgacgttcatgtcggtttctgctgcggaatcttcaacatattccagatcgcagatcgcttcgccgttaacgatgcctacggaaaccgccgccaccatgcctttcatcgggttggttttcagcttaccgttggcaaccaatttattcagcgcatccgccaacgccacgcaggcaccggtaatagacgctgtacgcgtaccgccatcggcctggattacatcgcagtccagcgtaatggtaaattcgccgagcgttttcagatcgaccgccgcacgcagcgcacgcgcgatcaaacgctgaatttccatagtacggccgccctgcttaccctttgccgcttcacgcgcattacgggtatgggtagcgcgaggcaacatgccatactctgcggtgatccacccctggccttgccctttcagaaaacgagggacgccttcttcaatggaggcggtgcacaacactttggtatctccaaattcgaccagtaccgagccttcagcgtgttttgtatagttacgggtcagggttacgggacgcacctgattagcgctacggcctgctggacgcatattgagatctccggcttaaaacgaatgtggctgcgcattatacggacttccgatggttattcctatcctgacaaggcctggatagctataatcccctcatctctcctttaaaaacgggaacatctatgatccgcagtatgaccgcctacgcccggcgtgaaatcaagggtgaatggggtagcgcgacctgggaaatgcgctcggtaaaccagcgttatctggaaacttactttcgtctgccggaacagttccgtagtcttgaacccgtcgtgcgcgaacgcattcgtacacgcctgacgcgtggcaaagtcgaatgtatgctgcgttttgaacccgatgccagcgcgcaaggcgagcttattctgaatgaaaagctcgcgaaacaattagttagcgccgcaaactgggtcaaaatgcagagcgacgaaggggaaatcaatccggttgatattttgcgctggccaggtgtcatggcggcgcaagagcaggatctggacgcgattgccgcagaaattttagccgcgctggacggtaccctggatgactttatcgtcgcgcgcgaaacggaaggccaggcgctgaaagcactgattgaacaacgtctggaaggcgtcagcgccgaagtagcgaaagtccgcgcgcatatgccggaaatcctgcaatggcagcgtgagcgcctggtcgcgaagctggaagatgctcaggttcagttggaaaacaaccgtctggagcaagagctggtgatgatggcgcagcgcattgatgtggcggaagagctggatcgtctggaagcgcacgtcaaagagacttacaacattctgaagaaaaaagaggcggtaggtcgccgtctggacttcatgatgcaagaatttaaccgtgagtcgaacaccctggcctccaaatccatcaacgctgatgtaactaactccgctattgaattaaaagtgttgatcgagcaaatgcgcgagcaaatccagaatattgaataattctggcgctcaatatgtcatagagcccgccttatgcgggctctcgcgtttatcggtagtacgtttttaatttccggcgaatagcgtcgataaggcgccgcttccactctaccgttgaagcccgatactgcataaaaatagcgccttccgcctgctccccggcaagcggcaggacaaaaagaccgcgcttatcggataaattttcataccaggggcgcggtacaatcgccattagcggcgccgactggacagcaggcgccagttgactgtaatcatgacaaacaaacgccagcgggcgttcaaacccggcacgagcctgctgcctgtccagttcgttgttctcttttgtccacggcaaacagtaaatgtgttgataatgctgtagatcagcaaaattcaacgctgtggcattctccagacgtgaacgcaatggcgcgccataaaccgcgatcaaacgcgtagtccccacccgctcgtaatgcagagcgctgacctgcttttgatggtcgccaattgccagcaccaaatcaaccgagctatccaacagttcatcacgccagggtcggcgggcaaaaggaaggcactcgatcaccgcctgatgaagatgacctttctctgcgagaacgggcgtaagcagcgcgttcaatgcgggaggaagtaccacccggaaacaacgggagccgttctctttatcgccaaacagctcctcattaagcgaaacaaacacaggcgccaatttgtcacgcagcgcctgcgcataaggcgtagcaatctggcggttcccttcccgtcgaaacaacgggtcgtttagcgcatcgcgcaatctcattaacgcatgacttaccgcagaaggcgataaagccagcttttgcgccgttttccccgtagagctcgtctccagcagcacatacagtacttttaacaggttcatatccatttgcagcaagttcattaaacgtctctcttattgaacctggctaaattactgccaggtatactgcgggcgcttcaatcaggagaacattatgaatcgctatgcattattctttgtatgtatattttcaacatcagcacttcctgccatggcggcattagatccttcacaaccgttatcacccacgcctccgttatcactgtttaaagcgtgggctaagcctataaagccgtttcaaatcacagaaggcgtgtggtatgtcggcacgaaaaatctctcttctattctgctgaccactccggcagggcatattcttattgatgcggggttggatgaaagcgcaccgcaaattaaagcgaatattgaagcggcaggattccgcctcacagacgtgcgctatctgttgaatagccatgcgcggctggatcaagcggggggcatggcacgtttgaaagcgtggagcggcgcacaattggtcgccagccaacccaacgccgatcagatggcgaggggtggacgacaggattttgcgcttggcgatgcgctccccttcccgcccgtcaccaccgataaaattatccaccaccaggaaagcatcatcctcggagggataaccgtgacagcgctattcacgcctggacatctacccggctcaacctcctggcgcgtaacgctccgcaacggcaagacgctaatttacgctgacagtctcgccacgcccgactatctgctgattaacaacaaaaattaccctgacctggttactgatattcagggtagctttaagacgctggccgcccagcatgttgatatctttattgccaacaaaggtgaccgcttcgggctactggagaaacgacagcaacttcgcaacggcgatacacaggcattctttgattccaatggcttgcaacagtatgtggaacgctcgcgccagcgcttcatcacacaacttaccgcacagcagccataatgaaataactcaccggcggcgcatccagggcgccgttcatttaatttatctaagtcaaaacagaaaaacctcgtatacaataaaccacaaaaatgatgttcaatttattgatatttataataaataattattaatcataaatttaaaatcattactaaaatttattaatcgtgtaatgccttagaaaatctcaatcgtgatacagcgcacaaatcgttaatcttcgcccccagtaaattagggggaaatcatgctgttgcacgttctttatttaattggcatcactgccgaggccatgacgggcgcactcgctgcgggtcgtcgtcgcatggatacattcggcgtaattattattgctaccgccaccgccattggtggaggctcagttcgcgacattctgctcggtcactatccgctgggttgggtgaagcatcccgaatatgtcattattgtggcgactgccgctgtattgaccaccattgttgcccccgtcatgccctatttacgcaagcttttcctggtacttgacgcgctggggttggtggttttctctattattggcgctcagatagcccttgatatgggcgaagggccaattatcgccgtggtagccgccgtcactaccggcgtctttggcggcgtgctccgcgatatgttctgcaaacgcattccactggtgtttcaaaaagagctatatgccggcatttcgttcgcctcggcggtgctctatattgcgctgcaacattacgtcatgaatccggatgtcgtcgttatctctacgttactgtttggctttacagcaaggttattagcgctacgtcttaaacttggcctgccggtattttattaccgccatgaagggcactaagacccaaatccgggaatatgctgagcagccagccatctgctcagcgttttgatctgcggattattccgccagtcgatgactctcccggcacgacgctcgcccgtcgctggtaactgccgccagtgttgctctgttcgcattaataactgctcccatgaacgatcgccgctggcctgtaatgcagcctgcgttaaggggatatccatcgccatgatccagcgggtaaacgactgccggcgcgccaggttaaattgccgccatatctgctcgctttttcctttagcaaagcctggcgtgttggctatttgcgctgacgtcagggcaagccaggagaagatatgcttaaagcgatgcgtctgatgcaaggcccgccagctggcttcgcccattccgtccagacccaacgccgaccgtgaccccagccataccagcctggagataaactgttcctgacacgtttccgacgcgtaaaagcaggtcagcgagttgaaatggctatcaggcggtacaggcttactccgctcacgactccgccagacgacctcatcaagccggggaatgccttgccccgccagactcaccaggatctgatcgcccggcgcgatatcccacgcttcccaacgcttcacagaatcgatattgacccgctgaacccgcttatcatccaatataacggggacaagcgacgctactacggtaattttgccgcttttccccaccgagaactgaatagcgctcacttgcgcgacctgcgctactggcggatatttccatgctgccagccagtcgccctgcccgggtcgccagtgttgtgacgcaggttctttagccatgcgtatcactacgccatccgttacaaagggtaatgctgacgtcagccatgactggcgcgcccgctcgacctcgctggcatcttttaccgccagggtatatttattcgtcagactgaatccagccttagcaagttggcttaatctttcgggcatatttgccggaccgtccggccacgcccaaataaaaatacccaacgaatttagcgcggaggcgttatcctggcgcattaacattcctgcgactttcgagcgcgcattcatcccgcccatccgttgctggatatgtccctcgcgctgtagaaagatttcgccctgcaacaccgcgttagcaagcgcgccttgtgttgtctgcggtatagaggggatcaggcgaatttttggcgtccagtcctcgccttgtagtccgttaccccggctgatagccctggtcagtttaccgttttgataaaccagcgttaccgctacaccatccacttttggctgtacccaaagctcgctgcgcccgcgcatccactgttctaccgcctgtcggtccgcgagtttacgtacgcccgtgtgcgcaacagggtgcattgttgtaccgtttaacggcggtgaaaccggagtagatgaaacatcctgaccaacacagcgttgccactgaaccagccttgcgctgagctggtcgtacacactatcgtcaaccgcgctaacaccttgtttccagtagatgtcattccagtcagcgagctgttgctgtaaacgggtgatttcttcagcggcccttgctggcggccaggccgggcaaagcgccccactctgcgaatgccacaataaaattccccacgccatacttttccataatctcatcacgacctcctgcgcacattgcccggcaggtatagcgctttagtgaataaaaaccgacaggtaaaaatgcatcatccgagccgctttccagattttttggtgggttgctgcaacgacgcgataaaagcggaaaaagggacgcaaaatgcaataatctggcgcaaaaagtgtgacaaagactacgtcgcataacggcgatgtgtataataagcccgtatcaaggctctatttcgataatcacagacgtaagatactcatggctcaaggtacgctttatattgtttctgcccccagtggcgcgggtaaatccagcctgattcaggctttattaaaaacccaaccgttgtatgacactcaggtttccgtttcacataccacgcgcgcgccgcgtccgggtgaagtgcacggtgagcactatttctttgtaaatcatgatgagtttaaaaccatgattggcagggaggcgtttctggagcacgcggaagtgtttggcaattactacggcacttcgcgcgaaaccattgagcaagtgctggcaaccggcgttgatgtttttctggatatcgactggcagggcgcccagcaaattcgcgaaaagatgccgcaagcacgcagcatttttattttgccgccatcaaagatcgaattggatcgccgtttacgcggccgcgggcaagatagcgaagaagtcattgccaaacgaatggcgcaagcggttgcagaaatgagccattacgccgaatatgattatcttattgtgaatgacgactttgataccgcgttaagcgacttgaaaactatcattcgcgctgaacgtctgcgtatgagccgccaaaagcagcgtcatgacgctttaatcagcaaattgttggcagactgaacccactttcagtatcatgcccagtcatttcttcacctgtggagcattttaagtatggcacgcgtaactgttcaggacgctgtagagaaaattggtaaccgttttgacctggtactggtcgccgcgcgtcgcgctcgtcagatgcaggtaggcggaaaggatccgctggtaccggaagaaaacgataaaactaccgttatcgcgctgcgcgaaatcgaagaaggtctgattaacaaccagatcctcgacgtccgcgagcgccaggaacagcaagagcaggaagccgctgaattacaagccgttaccgctattgctgaaggtcgtcgttaatcacaaagcgggtcgcccttgtatctgtttgaaagcctgaatcaactgattcaaacctacctgccggaagaccagattaagcgtcttcggcaggcgtatctcgttgcacgtgacgctcacgagggccagacacgttcaagcggtgaaccctatatcacgcacccggtagcggtggcctgtattctggccgagatgaaactcgactacgaaacgctgatggccgctctgctgcatgacgtgattgaagatacccccgccacctatcaggacatggaacagcttttcggtaaaagcgttgccgagctggtagagggggtgtcgaaacttgataagctcaagttccgcgataagaaagaggcgcaggccgaaaactttcgcaaaatgattatggcgatggtgcaggatatccgcgtcattctcattaagcttgctgaccgtacccataacatgcgcacgctgggctcgttacgcccggataaacgtcgtcgtattgcccgtgaaacgctggaaatctacagtcctctggcgcaccgtttaggtattcatcacattaaaaccgagctggaagagctgggttttgaagcgctgtatcccaatcgttaccgcgtcattaaagaagtggtaaaagcggcgcgcggcaaccgtaaagagatgatccaaaaaatcctctctgaaatcgaaggacgcttgcaagaggcgggaattccgtgtcgcgttagcggtcgcgaaaaacatctttactcgatctactgtaaaatggtgctcaaagagcagcgttttcactcgatcatggacatttacgcgtttcgcgtgatcgttcatgactccgatacctgctatcgcgtactcggccagatgcacagtctctataagccgcgtccgggacgggtgaaagactatatagccattcccaaagcgaacggctatcagtctttgcacacctcgatgatcggcccgcacggcgttcctgttgaagtccagatccgtaccgaagatatggatcagatggcggaaatgggggtcgcggcacactgggcgtataaagaacacggtgagaccagcaccacggcgcagatccgcgcccagcgctggatgcagagcctgctggagctacaacagagcgccggtagttcgtttgaatttatcgaaagcgtaaaatccgatctcttcccggatgagatttacgttttcaccccggaagggcgcattgtcgaactgcccgctggcgctacgccggtggattttgcctatgcagtgcataccgacatcggccacgcctgcgtcggcgcgcgtgtcgaccgccagccttatccgctgtcgcagccgcttagcagcggtcagaccgtcgaaattattaccgcgccgggcgcgcgtcccaacgccgcctggctgaactttgtcgtcagctctaaagcgcgcgctaaaattcgtcagttgctgaaaaacctcaaacgtgatgactccgtaagcctgggccgtcgtctgcttaaccatgctttaggcggcagtcgtaagctggcggaaattccgcaggaaaatattcagcgcgaactggatcgtatgaagctggcaacgcttgacgatctgctggcggaaatcggtctcggcaacgcgatgagcgtagtggtcgcgaaaaatctgcagcaaggcgaagccgtggtgccgaccgttgcgcaatcgaatcacggccacctgccgattaaaggcgcggatggcgtgcttatcacctttgcgaagtgttgtcgtccgatcccaggcgacccgatcatcgctcacgtcagcccaggtaaaggactggtgatccaccacgaatcctgccgtaatatccgtggataccagaaagagccagagaaatttatggcggtcgaatgggacaaagagacggagcaggaattcattaccgaaatcaaggtggaaatgtttaaccatcagggcgcgctggctaacctgacggcggcgattaataccaccacctccaatattcaaagcctgaatactgaagagaaagatggtcgcgtctatagtacctttattcgccttaccgcacgcgatcgcgtacatctggcgaatatcatgcgcaaaatccgcgtgatgccagacgttattaaagtcacccgtaaccgaaactagcgctatgaatccaaaacgttatgcgcgtatatgcgaaatgctcgccaggcgtcagcctgatctcacggtctgcatggagcaagtccacaaacctcataacgtttctgcaatcattcgtaccgcagatgccgttggcgtccatgaagtccatgctatctggccaggtagccggatgcgcaccatggcttccgcggcggcgggcagcaacagttgggtacaggtgaaaactcaccgtaccattggcgatgcggtagcccatttgaaaggacggggaatgcagattctggcaacccatctttctgataaagccgtagactttcgcgagattgattacacgcgcccgacctgtattctgatgggtcaggagaaaaccggtattactcaggaagcattagacctggcggatcgggatatcatcattccgatgatcggcatggtacagtcgctgaacgtttccgtcgcctccgcgctcattctttatgaagcccagcgccagcgacagaacgcgggcatgtatctgcgtgaaaatagcatgttgccggaagatgaacagcagcgcctgctgtttgagggtggttatccggtgctggcgaaagtcgctaaacgtaaaggtctgccttatcctcgcgtcaatcagcagggcgaaatcgacgccgatgctgactggtgggcgacgatgcaggcggcagggtaatcaccatgtcaggccgcttgttagacgctgttccgctcaattccctgacaggcgtcggcgcagcgcaaagcagtaaactggcgaaaattggcctgcacaccgtgcaggacctcctgctccacctccctctgcgttacgaagaccgcacccatctctaccccattggcgaactgctgcctggcatctacgccaccgttgaaggcgaagtgctgaactgcaatatcactttcggcggtcgtcggatgatgacctgccagattagcgacggttccggcattcttaccatgcgctttttcaattttaacgcagcgatgaaaaacagcctggcgacgggacgacgtgtgctggcctacggggaagcgaagcgcggcaagtatggcgcagagatgatccatccggaatatcgcctgcagggcgatctcagcacgccggaacttcaggaaacgctcacccccgtctatccgaccaccgagggcgtgaagcaagcgacactgcgcaagcttaccgatcaggcgctggagttgctcgacacctgcgccattgccgaactactgccgccggaactggcgcagggtatgatgagcctgccggaggcgctacgtaccttgcatcgcccgccgccgacgctccagctcgccgatttagaaaccggcaaacacccggcgcagcggcggcttattcttgaagagctactggcgcataatctcagtatgctggcgcttcgcgcaggcgcgcagcgctatcacgcgcagccgctaagtaccaacaacatattgaaagacaagctgctggcgtcgttgccgtttaaacccaccagcgcgcaggcgcgggtggtggcagagatcgaacgtgatatggcgctcgatgtgccaatgatgcgtctggttcagggcgacgtgggttccggtaaaacgttggttgcggcgcttgccgccttgcgcgctattgcccacggtaagcaggtggcgttgatggcgccgaccgaactgctggctgaacagcacgcaaataatttccgcaactggttcgaaccgttgggcgttgaagtgggttggctggccggtaagcaaaaaggtaaagcacgtcaggcgcagcaagaggctattgccagcggtcaggtgcagatgattgtcggcacccacgctatcttccaggaacaggtgcagtttaacgggctggcgctggtcattatcgatgagcagcaccgctttggcgtccaccagcggctggcattgtgggaaaaaggccagcagcagggctttcatccgcatcagttgattatgaccgcaacgcccattcctcgcaccctggcgatgactgcctacgccgatctcgatacctcggtgattgacgagctaccgccgggccgtacccctgtcactaccgttgctattccggatacccgtcgccatgaaatcattgatcgtgtgcgcaacgcctgcacaaccgaaggccgtcaggcctactgggtctgtacgctgattgaagaatctgacctgctggaagcgcaggcggcggaagccacctgggaggagctcaagctggcgttaccggagttgaatatcggcctggtacacggccgcatgaagcccgccgaaaaacaggcggtgatgcaggcctttaagcagggtgaactgcatctgctggtcgccactacggtgattgaggtgggggtcgatgttcctaacgccagcctgatgattattgaaaacccggagcgactgggcctggcgcaattacaccagctcagaggccgtgttggccgtggcgcggtcgcatcgcactgcgtgctgctctataaatcgccgttgtcgaaaacggcgcagaagcgtttacaggtattgcgcgatagcaacgacggttttgtgattgcgcaaaaagatttagagattcgcggcccgggggaattactgggcacgcgccagacagggaacgccgaatttaaagttgcggatttactgcgcgatcaggccataatccccgaagttcagcgtattgcccgtcatattcacgaacgttatccgcagcaggcacaagcgctgattgagcgctggatgccggaaaccgaacgttattccaacgcctagtgagcacggcggctttaatgccgccgtacaaacccttattgcgcgaaaatcggtaacatcaggtacagcttaatcaccaacgcattgacgatatcgataaagaacgcgccgaccatcggcaccaccaggaacgccatatgcgagggaccaaaacggtcggtaatcgcctgcatattagcaatggcggtcggcgttgcgcccaggccaaaaccgcagtgacccgccgccagcaccgccgcatcgtagtttttccccatcatgcgccaggtgacgaagatcgcgtacagcgccatgaagatggtctgtaccaccagaatcgccagcatcggcagcgccagcgacgccagttcccacagcttcaggctcatcagcgccattgccaggaacagtgacaaactcacgttccccagtaccgaaacagcacgctcaaatacgcgataaaaacccaccagcgccaggccattgctgaggatcaccccaacaaatagcacacaaacgaagaccggcagttcaagcaccgttcccgccagtagctgcgctacgattttgcccacggtcaaacagatagcaatcagggcgatggtttcgattagcaccagagaggtgatcatacggcccacatccggcttttcaaaggctgtcggcacggcctgatcgtcaggcattccatccggcgtggtggagtgtttcaccagataacgcgctaccggaccgccaatcaacccgcccagcaccaggccaaaggttgcacatgccatcgcaacttcggtggcattggcaaaaccataacgttcgacaaacagtttactccacgccgcgccggtaccgtgtccgccggacagcgtaattgacccggcaatcagccccattaacgggtccagccccaacagactcgccatgccgataccgatggcattctgcatcagcagtaatccgaccacgacgaccaggaagacgccaacaacgcgtccccccttgcgcaggctggcaaggttagcgttaaggccgatcgtcgcgaaaaacgccagcatcaacggatcgcgcagggtcatatcaaagttgacctcccaaccgacgctttttttcagcaccagcagagcaaccgcgaccagtaacccccccgccaccggttccggaatcgtatatttcttcagtaaggagacagactggaccagcttgcgacccagtagcagcaccagcgtggcggcgacaagggtcgataaggtatcgagttcaaacatttaaagctcctgtagtgcgctgtgacatgtgcgcacaaatcatttcctgagtcatttttttagctctttgcgagtcttcggcatggattttaagcagaaaaaggcaaaaagttatataaaaaggtgcatttatcttttttaaatattaagaatattcgctagcaatcgtttgcttttaccacctggtcagataaaatcaccgcttttccaccacgagaatgtccctgatgtccgttaacgccatcgagtcggcagatgcgcaaccggttgcgcagacgcaaaacagcgaattaatttaccgtcttgaagatcgcccgccgctccctcaaaccctttttgccgcttgtcagcatctgctggccatgtttgtcgcggtaatcacgccagcgctgttaatctgccaggcgttgggtttaccggcgcaggatacgcagcacattatcagcatgtcgctgttcgcctccggcgtagcctctattattcaaatcaaagcgtgggggccggtaggatcggggctgttatccatccagggaaccagttttaactttgtcgccccgctgattatgggcggtaccgcgctgaaaaccggcggcgcggatgtcccgacgatgatggcggcgctgttcggcacgctgatgctggcaagctgcaccgagatggtgctttctcgcattctacatctggcgcgccggattatcacgccgttagtctccggcgtcgtggtgatgattattggcctgtcgctgattcaggtggggctaacctccatcggcggcggctatgccgccatgagcgacaacacctttggcgcaccgaaaaacctgctgctggccggcgtcgtcctggccattattatcctgctgaatcggcagcgtaatccctacctgcgcgtggcttctttggttattgccatggcggcaggctatcttttagcctggtttatgggcatgttgcctgagaataacgcgccggtctcgcaggacatcctgatggtgccgaccccgctgtattatggtctgggcattgactggaacctgttactgccgttgatgctggtctttatgattacgtcgctggagaccatcggagacatcaccgccacctctgatgtctccgagcagccggtatccggccccttgtacatgaaacggctaaagggcggcgtactggctaacggcctgaactcatttgtttcagcggtatttaatacgttcccgaattcctgtttcggtcagaacaacggcgtaattcagttgactggcgtcgccagtcgctatgtgggatttgttgtcgcgctgatgctgattgtactcggcctgttcccggcggtaagcggttttgtgcagcatatcccggaaccggtgctcggcggcgccacgttggtgatgttcggcaccattgccgcctccggggtgcgtattgtctcgcgtgagccgctgaaccgccgcgcgattctgattatcgccctgtcgctggccgtgggtcttggcgtctcgcaacagccgcagatcctgcagttcgcgccggaatgggtgaaaaatctgctctcatccggaattgccgctggcggcatcacggctatcgtgctgaacctgattctcccgccggaaaaaccgtaaaaaccctgcggcggcgacacgattcgccgctgctgtaacgctctttcaccattcctgtcttgaggattgcacgcaaatcgtgcataaatcccctatgtgcatttcacgggatggaagaccatgaaattgattgggaggttgcttctctacgtgctgatcgcctgtttagtggtgattttcggcttttattttctgctgcaaacgcgctggggcgcagatcatgtcagcaactgggtatcagagaacagcggttatcacctcacattcgacgtgatggatcatcgtttttccgccccatcccatcttttactggagaatgtgacctttggtcgtgatggtcagcctgctaccctggtcgcgaaaaccgtagatatcggtctgagcattcgccagttaaccgcgccgctgcatgtcgacacgattctgttacaggacggcacgctgaatatttcagtgcaaaccgcccctttcccgtttgaggccgaccgcctgcaacttcgcaatatggcgctcaatagtcccggtagcgaatggcggttgagcgcccagcgcgttaacggcggcgttatgccatggcaccccgaagccggtcgggtattgggcaataaagcccagatccaactgagcgccggttcgctgacgttaaacgacgttcccgccactaatgtgcttattgaaggcagtatcgaccatgatcaggtgatgttaaacaccgtcggcgccgatatggcgcgcggagcgttaaccggcgtcgcccggcgtaacgctgacggtagttgggtcgttgaaaatctgcggctgaatgatattcggttacaaagcgataaatccctgagcgagtttttcgcgccgcttactacggttccatctttgcagattggtcgtcttgaagtgacggactccagcctgcaaggaccagactgggctgtcaccgatcttgacctgagtttgcgcaatctgactctgcgcaaagaagactggcaaagtcaggaaggtaaattatcgatgaacgccagcgagtttatttacggctcgctgcacttgctcgatccaatcctgaacgccgaattttcaccacagggcgttgcgctacgccagttcaccacccgctgggaaggcggtatggtcagaacctccggcgcctggttacgcgaaggcaaagcgcttattctggacgataccgctatcgccgggctggagtatacgctgccggaaaactggaagcagttatggatgaagccgctgcccgactggttgaacagcctgacgctgaaaaaattcagcgccagccgcaatctggtgatcgatatcgacccggccttcccgtggcaaatcaccgccctggacggctacggcgcaaacctggagctggtacaacatcatcaatggggcgtctggagcggcaatgcgaccctcaacgccgcagcggcaacctttaaccgtgtggacgtgcgccgcccgtcgctgtcgttgacggctaatgccagcacggtcaacatcagcgatctgagcgcgtttactggaaaagggatgctggaagccactgccagcgtatcgcaactgccgcagcgtcagacgcaaatcagcctgaacggacgcggcgtaccaatggatgtgctacagcagtggggctggccggcattaccgattgctggcgatggcaatattcagctcacggccagcggcaatattcaggccgatgcgccgttgaaaccgacggtaaacgggcaattacacgcggtcaacgcacaaaagcagcagataacacagacgatgcaagcgggcgtggtgtccggcggtgaagttacgtcaacggagccagcgctgtaattgagggcttgcccggtggcgatggcgcttaccgggcttacggttcttgctcatttgtaggccggataagcgcagctcacggcgccatccggcgattcagatttaaagcgtaatcaccacttcatttcccagcggggtaaccactacgcccagttcacttcccgcatatgagccgcatttggtaccgctaatctgcgtaatattacgcagacacagcgtccagttgcgcgcctcgccttcgccgctcaccgtaatggtattgcctgtgcgtttcgcctgcagcgtaaagattgtcgaaccatccgtagcagggacttcgcagaccgcttcgcagccgtcatccagatggaataactggaaggccgtaccctcatgccaggcgtaatcgggcttctggctattgttgcccagcgccagtagtgtattgtcacgcacatacactggcaggctcaggaagtcatgctgctgtttatgccagcgactgccctgcacttcatcgttgcgccacaggtgcgtccagcggccttctggcaggtagaactccacgtcgcccgcttcactaaataccggcgctaccatgaccgcatctcccagcatgtactggcgatcaagataatcacacgccggatcgtccgggaactccagcatcatcgcccgcatcattggcgtaccggcttcgttggcacgcgccgcttcccgatacagatacggcatcatccggcacttctgttcagtgaagaagcgcaccacgtcacaggactcgtcgtcataggcccacggaacccggtaggatttgctaccgtgcaggcggctgtggctggagagcaagccgaatgcgcaccaccgcttgtagacatgcgccggcgcggtattctcgaatccgccaatatcatgactccagaagccaaaccctgacaggccgatggacagcccgccgcgcaggctttccgccatcgattcgtagttggcgtagcagtcgccgccccagtgcaccgggaactgttgcgcgcccaccgaggcggaacgggcgaacagcaccgcctcttcaacgccgacggtctctttcagcacgttccacaccagttcgttgtagatgtaggcataatggttgtgcattttctgtggatctgaaccatcaaaccactgcacatccgttggaatgcgttcgccgaagtcagttttgaagcagtccactcccatctccaccaggcccttcagcttgtcggcataccattcgcaggcttgcgggttggtgaagtcgtaaatcgccagtcccggctgccatttatcccactgccacaaggagccgtccgggcgttttagcaaatatcctttctctttcaactcctggaagaccggggatttctggccgatgtaggggttaatccacacgcagactttcagccctttcgctttcaggcggcgaatcatccctttcggatcggggaaagtcaccgggtcccattcaaaatcgcaccactgaaaagctttcatccagaaacagtcgaagtggaagacgtgcagcggcagattgcgctcggccataccgtcgataaaactgttaacggtcgcttcgtcgtagttggtggtgaatgaggtggtcagccacaggccaaacgaccaggcgggcggcagcgccggacgacccgtaaattgggtatagcggttcagcacgtctttcggggtcgggccgtcgatgacgaagtattccagatactcgctctcgacgctgaactgaactttggagactttctcggagccaatttcaaacgacacgcactgcggatgattcaccagcacaccgtagccacggttggtgatatagaacgggatattcttgtacgattgctcggtgctggtgccgccgtcgcggttccaggtctccaccgtctgaccgttacgcaccagcgcggtaaagcgctcgcccagcccgtagacggtttcgcccacgccgagatccagacgctcgaacatgtagttgcgcccgctgttggtatcctgcacatagccgttattcttcaactggctaccggtgatacgtacaccgttgcgcagaaaatccagagaccagatctcgcctttggtgacgcgcacgctcaggctgccgctcttgagttcggcaaattcggcgttgttctgcatctccacgttgatatcttgcaagacattgagcggataatgtgggccgttatccaaagcgccctggaagtgttccatccgtacacctatcactccttcctgcggcgagaaaaagcgcagggtaaacaacggggtatccagttgccaggttcgttcgcggacatcacgcggcgcggcatagatcaccatctcattcccgtgctgttcaacgtcgaacacctgaaccgggtgaatcaaattaaggccaggctggatcagccagtttccgtcgctaattttcatagtctgttcctttagttttgcaattttttatgggtaaattcttgttcgttgcggtgtgcgccctgcgccagttgttccagaatggttttcaggaacgggcttttcagggtgtaatagcgtttagcgatcgcggcgctcagcagataacagatggccggaacgatagtgaacagagcgatgatgatgctgatcgtggcgctgttttgcgttttcgccgccgcgtcgtaaccgccgcctgccagcatccagccaatcagcgccccgccgagggcaagacccagtttcagcacgaacaacgtgccggcaaaactgatccccgtcaggcgtttgccgttacaccattcgccgtagtcgacggtgtcagacatcatcacccactggataggcgtgactaactggtgcaatacgccaatcacgaagataaagacgaacatagcgatcgtggcgtgcatcggtacgaagaacatcgccacgctgattactgcgagtaaagcgttggtccaccagaaaacgctcactttgcatttccagtcggtcaacggttttgccagcgccgagccaatcaggttgccgacgcaataggtggtgaggaaggcgacaaacacgcccggtttgcccaatatccaggtgacgtaatacatcatcgccccgccgcgcacgcataccgccagaatattcaggatggtgagcaggccgactatgcgccactggtcgttgtgccagatatcacgcaggtcttcacgcatggaggtatgggtggcaggcgcttcaacgcgctctttggtggtaaagaaacagaacgccagcatcaggaacgccaccaccgagagcgccgcgatacccccctggaagcccagcgccttattctcgccgccaatcagtttcaccagaggcatcatcagtacggtagagagcattccgcccgccgttgccagcacaaagcgccaggattgcagggagatacgctgcgttgggtcattggttattacaccccccaacgcgcagtaagggatgttgaccacagtgtacagaagggtgagcaacgtgtaggtgatggcggcataaatcattttgccgttcagactgagatccggcgtgctataagccagcacacaaacgataccaaacggcaacgcgccaaacagcacccagggtcggaatttgccccagcgagagcgggtgcggtcggccagcaggcccatgcaagggtcggagatggcatcaagcgcacgcgccagtaaaaacatggtgccgacaaaaccagcgggaataccgaaaatatcggtatagaagaacatcatatataacatgacgttatcaaagatgatgtggctcgcggcatcgcccataccatagccaatcttctccttaacggagagaatctcacttttcattacgcatccttaacgctcacaacgctcactgataccggttacagtttttgtaaaccttccctgcgagcgtgaatattccgttatttagttatcaaattacgattcttgttttctgtgatcagggtagcgtcaaaaagtgtgatgaaatgtaactaatggattttatgggggtttatatgaaaccggtcatggcagaaggaaagggaagttaaaaaagcacgggaggggatgtggaaacgccaggaagtagctataatgcgcgcgcctccatgtagcaatcgaggcgcggaagatcgtcgtctccggtgaggcggctggacttcaaatccagttggggccgccagcggtcccgggcaggttcgactcctgtgatcttccgccaacatccttctctcatgcccaccattcgtcctctatttcgggacaaagtatttgcttattattaagaccagttcttgcatataatacgaaaggaaaggtggagagagaaagtggaatattattttattaatcaccatttaccgattgctaaaaccgaacgtccatttattgtgggatatcgtctgcaaagaagggataaaagtacgccaggactaacgcgggcgggacttaactaatcaccaaacgaatttgtgggttatacttacaggctcatcctttctcaaaagagatacgcttaccaggccaaaattatgagatcaacgtatagagccatccggataaagatacatgcctccctccagatacacgggttctccttcttctaccgctaaattatgatacagcgattgcatttcatcatctgcactttcttccggttggttttcaactcgataataggtatctacatcatagttctgtttacggagatcgtcgtcgctgtatacgccaagccgtttttttaagcctgttatattaaatatccattttaacccatctttaatataataggcatcaccataagcattttcatcggggcattctttatagcccatccgcaatgcaacatcacagccatgcttaccaacatatttataactcatatcccccccaatatgttgcttcaatatcccggataaaattcataacgaaaacctatcctgataacctatgccacatgaaggatagaatttaaactaaagtacgcgttatattatcccctaagtccgtatcaagtatgcgtattctgtagtagttagtaatatgttctaatttattaatgtgagttatatatgaagagattatttacagctatgattatcgcttttattaccgtcacggcatcatccagtgcgcttgcctgcccaaagggtcaacatccacatggggatacaggctcacatcataagggtggatggtgttcatacgagcagtaacgtcgcagcttactcatctacttgaaggcactatagccttacgtttatcaacgcaggcgctacgtttgtcgatgccgtaactttctgaagaaaaaacatgaacgagttggtatcgatcgcaaagaatatggttaccagcaacagtcaccttgtctccaggctgtcgatattctacggacacgacaggaaaggattttattaatttcttataaaaaccatgttaatcaacaggataaatagttaaaacgtgataaaaggcgtaacctttacccgcttaaagcgggcaagattgcaggcaagagatgttattatactaaaacataaaaacaggtgaggctagtgtaatgagaatcgacaaactttcactgcttcactttcgttgtttcaggcagctcgatattacttttgatgaacacattacgattctggttgcaccaaacggcgcgggcaagacgacagtactggatgcggtacgcctggcgctgttcccctttattcgtggcttgccggcctctatgtaaaagataaatcgctggtgatccgtacagaagatgtacgtctggttttccgccctgaagcgctgaacatggaaatgtcatctccggtcatgattacagctaccggagaatgggaaagcggaaagacggcaacctggatgctcgacaagcgaggagaacagccgccgcatgaagataagacggcggcgcagcttacccgttggggtgaacaacttcagacgctggtgcgtgaagagcataatttgctgcaggttgaacttctcctaatgctttatctggggactgctcgcttgtggtatcaggaacgttatgaggcacagcctactgaacagcgtctggataacagcgccttttcacgtttgtctggttatgacgattgcctctcggccacatcaaactataaacagtttgagcagtggtatagctggctatggcatagctaccgtgaacatcaaatcacacaacttgaatcaccttcaacaaagttaaaagaagatgttcgtattcgcggatgaaagaagctattcaggctatccagcaaaccattaactgtctgacaaaagacgtaactggctggcgcgatctggaatacagctccagccataaccagcaactggtaatgaatcatccgcagcacggcaagatccccttagcccagctcagcgacggcctgcgtaatgcggttgcgatggtagcggatatcgcgtttcgctgtgtcaaactcaacccccatttacgcgatgaagccgccttaaaaacacaggggattgtgctgatcgatgaagtcgatatgttcctgcacccagcctggcagcagcaaattatccagtctttgcgcagcgcatttccactaatccagtttattgtcactacccatagcccgcaggttatcagcacggtaaaacgtgagtctgttcgcctacttgaacaggacgagaaaggtaatggtctggcgtcaataccaccggggcgacctacggcgagccaagtaatgatgtactgcacagcgtgatgggcgtcgatccccaacctccggttaaggaacaggatgttttcgaacgtgggattatcaatgtatttaaggggttaagccaggagtacaaaaccaataatccttgttatttcggcaagaagattatcgtcaacaatctggtgaagcatgaccgatggggctacagcctgaactggggctggcgacgcgaccagctcgccgatctggaacgaatgctctacctgctggatagtaaaaccattcctgacaaccggcatgatgtctctatccggtttatggacttcgtgcgcgataatccgcgtgagcaggtctttgaagacgatatgttcaccatccgctacttttagaagggcagcggacatatcacatttaagcgtctggatctggtggagaatatgaatgatatcgtggcgaagcattatccgggggcgctgcccgcaaaataaacgctatctgcgtaataagcttcaccaggaatttctggcatactaggcagattacggcattgcgagtcagatataagcggaggcggcatggcagacaaatacttaacccaatccccggcaggcgaatttgttatgtttgccagcgatgacggtgaagttcgtgtggagtgccgctttgagcaagagacgctatggctccctcaggcaaccatcgccaacctttatcagatcactccccaggcagttacacagcacattaaagcgatctatgaagaaggcgaacttgagcaaaacgcaacctgtaagtcttacttacaagttcaacaggaaggtagccgtcaggtaagccgcaacaggcttcactacagcctgcctgtcatccttgctgtcggctaccgcgttcgttccccgcgcggcacacagttccgccagtgggcaacccagacgctccagaaatacctgatcaaaggttttgtgatggacgatgagcgcctgaaaaatccgcccgtgggttcatcggctgtacccgactattttgatgagatgctggagcgtatccgcgatattcgcgccagcgaacgtcgggtttatttgcgggtacgagagatctttgcgttagccgccgactatcaaccatcgctcaaagaaaccacgcaattttttcaaaccatccagaacaagttgcattttgcctgtaccggacataccgctgctgaactcattcatcagcgtgctgacgccagccagccgcatatggggctgaccagctataaaggtgaagaggtacgtaagggtgacgtgacggtggcaaaaaattatctcactcaggatgaagtcagcgagcttaaccgcgtagttaacatgtggctggattttgccgaggatcaggcccgtcgtcgtcagcagatctttttacgcgactggcaggataagctggatcagttcctgcaatttaacgaccgtgaggttttacaaggcgcaggtaaagtcactaagaaaatggccgatgaaaaagcgcaggcggaatatagtcagtttgctgaacaacaacggcgcttaaaagaagccgaaggtgagaaggatatcgccggtttgctacaatggaaaacagaacctaaaaagtagctcagaatgccccgaaccccacaagcaaaatcatttgggggcacaatagtgggcaccagtaaaaatccaacaagataaaaatcaataaattcaacagaccaagatatcaaattagactcctgtgattgcatgataccgtcgtgaatatggcggttttatccaggcgtaaagactgtgggtagtaatatcaagacgtgttgcgacgctggaaacagaatggccgcgctcaataacctgttttaccgctttaattataaactcttcgggataacgtttaccgctcatgggctcctctctttaagctatcttaaatgactctgcggtgtctgttaaacctgtggcgattcatttaattttttgtacgtatcccacataatcgtgctattcacatttagagatcacgtcatcgatctgctaacgaaggaatctctatgtgtaaatcccgtctcactgagcatcagaacatcgccgtaattaagttggccgaagccggatgaatggttaaagatatctgccaggaggcggatatttgtgaagtgactgactatatctatggacattgggtttcaccacatcctgtttctcactaatgtgctccgggaaagagttttcatcagatgagcgattgaaaagagaagccagaagctgaagttgcttcgaccgataagtctgtcggttgctcagactgtcacgatcagaattaagtcagatcaacttattggcaaggtatgactcccggcgttaagttacaaaattttctcatggcattagcattacaccctcttaaagtttacatgcgtctctataaaatagtcttaaatttgtatataagaagttgatgagagcacaaatgtcaccattaagtcattgaataacaatgcaataaaagaaaaaatcttaaattagcttttaataataagaattcattacaggtttacaggaattacttttatatttcatcacatcaccccgatagtgacaaaggcagcagacagatggtattgagaaccgttatttatcactctcatgatttagcaaatagtgctgttttaagattttttatgatattggagatactgtataaaaatctcaatgcgtgaaatacaaatccgaaatgatgtattacgactgtcggatctgtcatggttttttaaagctgtattttagtgctttccaggagtttatgacactgacaatatttcgcgacttttgacagtcgtagtactttatattatctggattgacacatttatttaccaatgaaatattaatagaaacatcgacaggagtcgttcaggatgatgagaaagccttcacaaattgtccattgcattagttgcgatttatcctgtcaattatttcctgacagcgcagtacgggtgcaatactgtcataatgcggcattttccatctggccagatggtaatgctttcctgaaaaaagggtttattgaaaagttattgcttgatagacacaaccatttatccagcggttttatctttgttgatttttctttcccgaatcttcgacgatttaccgatttgcaatgggctgacagtctggcagacagtggcatgcatattgtcctgatttctgacagaagtttaactccgctggccaattactggattttgaaaagcaataaaatacaaggaattatttattccgatgacgatgatattgtgcaacagcaaaagatgcaccgcttgtttaccggtcggcttgccaacagtaaacgtggacgaacgcttaactatacggaatttatattactgaagcgctttgtatcaggaataagtattcagcagattgtaaatattgacaatattgatattaagaaactttatgtgcataagctgcggcttgaaaataagctagggcatagcattcataaaataatatcaaatattttatagatccgtttccatttttattatttccatattattgcgatgtggaagacgctttacgccataatgcaggaggcagaatgccaactccccaaaattactcattcatcgccatagcggtatcagcagcgttagcctctatggtatttccctcccaggcggcctgggttgacgttgatagtctgccatccagtgggctggtcagccagttgccgccggaattacaggctattattcccgctcaggccagtaccggtttcaccaaagtcggtactatgcccaactacgtttatcagtggaacaccggcaccatcccggtttatggcaatggcctcacgcttaatgggccgggcgcggaggcgtttgaacacactgtcacggttattcagaacagcgggacgggaaatccgggcgtgatttttggcaacgacctgaccattcggacgcagtcggcgaatgccgcgaataatggtagagacgtcgatggcatccgtactcacggcgcaaatactccggataacccggtatttattattaccggtgaccgtaccaacatctacgtggatggtcaggatggtgacggtattaacgccggatataactcactgggccagggttggaccggatcggccaatatttacgtcggcgacgatctgtatatcaaaacgaccggtagccagggacgtggcattacagctaacgccatgcgggatgcgtcacgtgccaaaaatacgattgtcgtcggcaatcgtgcgcatattgttactaccggcgacagttcagaggggctgcgtaccggacaaagcggttcgttgattcgtctgggtgacgatgcaactatcgaaacatccggcgcatcctcaacggggatttacgcagcatcctcctccagaaccgagcttggcaacaacgctactattacggtgaacggtgccagcgcacacgcggtatatgcaactaacgctaccgttaatttgggagagaatgccactattagcgttaacagcgccagtaaggctgcatcctatagtaaagcccctgccggtttatacgccctctcccgaggcgccattaatctggcaggcggtgcggctattactatggcgggcgataacagtagcgaaagttacgccatcagcacggagactggcggcattgttgacggttcttcaggaggtcgtttcgtcatcgacggtgatattcgtgctgctggcgccaccgctgccagcggtacgctaccgcagcagaacagtacgattaagctcaatatgacggacaactcgcgatgggacggggcgtcgtacatcaccagcgctacggcgggcacaggcgttatctctgtacaaatgagcgatgcgacctggaatatgaccagcagctcaacgctcactgacctgacgctgaatagtggcgcaaccattaacttcagccatgaagatggcgaaccatggcaaacgctcaccatcaatgaagattatgtaggcaacggcggtaagctggtctttaatactgtgctcaacgatgatgattccgaaacggacaggctgcaggttctcggcaatacttcaggcaacacatttgttgcagtaaataatattggaggagccggggcgcaaaccattgaaggtattgaaattgttaacgttgctggcaattccaacggtactttcgaaaaagcaagccgtattgttgccggagcctatgactacaacgtggtgcagaaaggtaaaaactggtatctgaccagctacattgagccggacgaaccgattattcctgatccagtagaccctgttatccctgaccctgtcgttcccgatccggtggaccctgatccagtagacccggttatccctgaccctgtgattcccgatccggtggaccctgatccagtagaccctgagccagtagacccggtcatccctgatccgacaattcctgacatagggcaatctgacacaccgccgataacagaacatcagttccgtccggaagtgggcagctatcttgccaacaactatgcggcaaatacgctgttcatgacgcgtctccatgaccgtctgggtgaaacccagtacaccgacatgctgacgggtgagaagaaggtcaccagcctgtggatgcgtaacgtcggcgcccatactcgcttcaacgatggcagcgggcagctaaaaacccgcatcaacagctatgtgttacaactgggaggcgatctggcacagtggagcactgacggtcttgaccgttggcatattggtgcaatggcaggttatgccaacagccagaaccgcacgctgtcgtccgtgagtgactatcattcccgtggtcaagtcaccggttacagcgtcggcctttacggcacctggtatgctaacaatatcgatcggtctggggcttatgtggatacctggatgctgtacaactggtttgataacaaggtcatgggtcaggatcaggccgctgagaaatataaatccaaaggaattaccgcctcggttgaagccggttacagcttcaggttaggtgaaagcgcgcatcaaagctactggttgcagcccaaagcgcaggtggtatggatgggcgtgcaggctgacgacaatcgcgaagccaatggtaccctcgtcaaggatgataccgccggtaatctgctaacccgcatgggcgtaaaagcctatattaacggccacaatgctattgatgacaataaatctcgagagttccagccattcgtggaagcgaactggatccataatacgcagcctgccagcgtgaagatggacgatgtcagcagcgatatgcgtggtacgaagaatattggagaactgaaagtaggtattgaaggacaagttaccccgcgcctgaacgtatggggtaacgtggcgcaacaggtgggtgacacaggttatagtgatacccgaggaatgttggggatgaaatacagtttctgattcaggtaacaacagagccgctgatcttcagcggcttttacccggaagcgctttcatttagctgataggtttcatgaacggctcccaaaaccgcttaatgtgtacagaaaaatatcgggcgtttcccgatggtgaacataaagccacgatggccctgagtcaggatggtgtaactgatacttttccctggatagacataaaaatcgggtaaaaccgtctcgataaccgcatcggacagtgtttcgtcacgcgtgactttgttgatatccgtcgatataaaatgggtgctgtctttattttcactccatacataggaaacatcacggcggatcacgccgctcattttattatcgacgtaatacgttccgctgatggaaaccaccccagtgcgttttttcagcgaatacataaagtccagcgtcaggttagcctgagtgttgttataaaacacaatcacaggcgccgtacatttctctggatcccggttcttttccgtatacaaatgaaaaagatgcccaagccctactcccagaaacagtagcgtcaggcaggctaacatcagtgcctttttacccatgtgtcaccccgcggaaaaaaagcgtcacgcagcctgtatcaccgcgcgttttataaggttgctgacaaatcaatgccgtaaccgctggggtgcgactgctggaagggaaatagacccatgggtatttctgacaatccataccggtttttagaatcattgacttatagcttgcaaagcggctaccgctttcgatatcttcattccgcgagaaaaaatgacagccctgagttgtttcaaccagcgtgtagcgatcgtaaaaatccttatcgggaacggtttgccagcttatagtgccaagcaaaataccaacagcaaatgtcccggtcatccaaagtacaggtacataatgtttaaaccaacgccctgacatacgcggcggcgtctcaccctttttttctattgtctgagcgaagtctttgcggatggtcatgaggctcacaccaggctcaatctgaaagcctctacgcggaaccgtgattatcagcgtatcttcattttcgccaacggtacgtaatccgcggcgaataatggagatattctgataaagcgtatttgccgacaccaccatgccgtcttcttcccacactttttgaaagaatgtttgttgtgagacgacggagggggcgttttccagcagaaggcgcaagcagcggctggcgggcgttgtcagaataatgttgagatctggcctcgataatgacgccaggcgattcatttctggattaaattcaatattatcgttaattatccataacatcgcattgttaccatgccaaaacataacgtagttggagagggttaatagacaccactgagtatagtctgatgctgtggctgcgtagcaggacatggattgtcccctgcacataccgatcatatagaagagcgagaggcataagacattaacaggtaagcgtagacaccgcttttctcattatagcagactcaggggtgaaagtacgtttggttttcttgttcgttaagtctcctgttttgtattgaggtgagaatatcacctttaatcaagtggccaaatttactgtgccactacgctttaatatctcatatataaatcatgagaaaaaatatcctgataatctaccccacatgaaagacaaggttttattcaatgtgttcctataatggcttgtaatatcccaaaaagcagcactcgttatatagggatagtttccaatttattaagagttacagtagccatacttaataaaagcacgcttcccacttaatatttaagctgtgctttatgttatttaaatataaataagttaatccttaaccaacatatttcaaatttataccaaataattttaaaactatctatcagaaacaatttgtaggggcatagtttgttttttcaatcaataatcctctctgacatgtaaaatagaaacatttattcataatatgaatattgttgtgataacaaattcgcgtgaaagtaaatcgactgaaggtgatgccgatgaatattccttcagaaagaactcaacagggtaatccagaatcggcaacggattactgtcatcagcttaaaaacggaaatcgccccggcgattaatgactttaacactgatagtgactatcagtgaaaggcaacaacaaggaatgaattatgtctacacccgcgaattttaacggtcaacgccctgccattgatgctaacgacgcagtaatgctgctgattgaccaccaaagtggcctgtttcagaccgtcggcgacatgccgatgccggaattacgcgcgcgcgccgcggcgctggctaaaatcgctaccttatgcaatatgccagtcattactaccgcatccgtaccacagggaccaaatggtccgctgattccggaaatccatgcgaatgcaccccacgcgcaatatgtcgcgcgtaaaggggaaattaatgcctgggataatgccgattttgtacaagcggtaaaagcgacaggccgtaaaacgctgatcgtcgccggtactattaccagtgtctgcatggctttcccagccatcagcgccgtcgcggaagggtacaaggtatttgcggtaattgatgcctccggtacgtacagtaaaatggcgcaggaaattacgatggcccgcgtggtacaggcgggcgtagtaccaatggataccgcggcggtagcctctgagctgcaacgtacctggaatagggaagatgccgcagaatgggcggatgtatataccaaaatattcccggcctatcagctactgattgaaagttataccaaagcgcaggaagtagtaaaaaataatgaactgctggattctcaacgcgcataaataacgccctgaagcggctaaatagccccatttaatggggctattttacttgccattttggtcctgggcagtgctcgccaaaacgcgttagcgttttgaacgccgcttgcggcggcccgaagggcgagcgtagcaagtcaaacctcacgtactacgtggataggctcttaatcaaatacgccattaataatcgccgtgaccaccgcggtactgagcgcgatcagcaccagattatccccaacgattttccactcatagcccggataataaggtaattgtcccagcatagacgccggcaccgtttttttagcgattcccggcggcagcggttttcctctcgccagatttttcgcaatccccggaggtaaagactgataacccgtcagccctaaattcactgccagttgtctggcgacagcgtagctaatgtccgactcgacgtgatccggtttaccgccatttttacggtgttccgttttttgcccggcatttcctttatgtccgttaccgttattaccctgattagccgcgttattaccatgtccgccgccattgccatttcccggattcgccagcacaggcgtagcgctcagggaaaacgtaatcaacgtcgccaggacggcggttaaaccacgacgattattcatgatattgcccttctgatgtgggataccatgaaaatagcgccccgccataaaaagaacaactacatcgattcttattttaagcggggctcgccaacagcaacttatcgtatccagatagtcagtaaaatcaggatgattgctatcaggacaacctgataaaaaattttgtccaaccctcttttttgcatggcgtcacctcgttagaaaacgatttgccagagggctaaacacaacaccaacaggctaatcagtaaaaatatcagcgcgatgattttatcgggtgagcgattcatctgggcgatcctcaaacatcattaaaaccactggccaaagcgtttgatataaaagcgcttcatgccttgcgccaccagacagtagctcaataatgtcgccaccaaccatgggaagtagctcagtggcagcggctccagtccaaccatcgcgcccagaggtgagaatggaatataaatgcctatcgccataatcaagccggtcgtcaataataccggcaacgtcgcccgactttggataaacggtattttctgcgtccttagcatatgcacgaccagtgtctgcgagagcagaccctcaataaaccagccggactgaaagagcgcctgcgcctctacgttattagctgcaaagacgtaccacatcaacgcaaaggttgtgatatcgaaaatagaagacgttgggccaatccatagcataaaacggccaatatttttcgcgtcccatttccgcggcttacgcaggaactctttatccattttgtcccacggcaacgacaactgcgaaatatcgtacatcaaattctggatcaacagatgaatcgccagcatcggcagaaacggaataaacgcgctggctaccagtaccgaaaaaacattgccgaaattagagctggcggtcatattcaggtatttaatgatattgccaaaggtttcccgccctttgataacgccttcctcaagcaccatgagatctttttccagcagaataatatctgatgactctttagcaatatcggcggcgctatcgacggaaattcccacatccgcatcacgaagcgcgggcgcgtcgttgatcccatctccaagaaaaccaacggtatgaccatttttctgtagcgcttgcaaaatacgcgttttttgtaacggcgtcagccgggcgaatactgcgcgtttctccacctcagccgccagttcggcatccgacatcgcctcaacctgggttccggtcaggatatcgtgcgtatcaatacccacttccagacagatacgcgccgtcacgaccggattatcgccggtgaggactttgaccgccacgccgttatcccgcaacgcggcaatagcttttccggcgctctctttcggcggatcgagaaaagtgagcatcccttcgatggtaagttcgttctcatcctccacacttaatgtcggattgttcccggaaccatccagcttacgtgtcgctatcagcaatacacggaatccctgcgcattgtaatcttcggttttcgccagcagtagctcgcggcgtgtttccgtcagcgccaccacacgatcgccttcgcgaagatgggtggctaccatcatcatctcttcaacagcgcctttacagatcagacatctgtctccatgctgcgcatcctccaccaggaccgatacccggcgacgtacaaagtcgaatggcagttcatcgcgtttaatgaagcgcgcttttgtcgatggcgcgatgcggccctcgccaaaacgcagtatggcgcgatccatcacattccgggcgccgctctggctgctactattcagccaggccagcatcaatacccggctgctttttacaccgctcacatccagatgatgctccagaaaaatattgtcctgggttaaggtgccagttttatctgtacacagcacatccatcgcgccgaagttttgaatagcgttcaggcgcttgacgatcactttgcgccgcgacatcgcgatcgcgccttttgccaggttggaactgacaatcatgggcaacatttccggcgtcaaccccaccgcaaccgccagcgcgaacagcgaagcctctacccagtctcccttactgaaaccattgatcagcaggacaaccggcaccatgatcagcataaagcgtatcaacagccagctcacgctgttgactccgcgatcgaaagccgtctgggtacgcgtacccacaatggatttcgccagcgagccgaaccaggtacggcttcccgtcgcgaccacgaccgcttgcgctctgccgctggttacattggttcccatcagacagatattgcccaaatctagcaggcttttatctttatcaggcaattgctcgctgtctttacctgccacatcagccataacatcgtatttttctacgggtaatgattcaccactaagaattgactgactgataaagagatcgcgcgacgccagcagtcgaacgtcggcgggcaccagatcgcctgcggccagaaaaaccacatcgcccggcaccagttcttcaatgggaatctcttcctgcaccgcgcctatattgcccggcccacgacgcaacaccgtggcggtggtgcgaaccatctttttcagcgcctgtgctgctctgttagtgcgaaactcctgccagaaacgcaataacccgctcaaactgaccatcgtcagaataatcagcacgccagtgagatcggtctcttcgccacggcgtaacgggagccagtaatccgtgatgaaactaacccctgccaatgccatcagaacgtaaataaacgggttattgaatgcctgcagaagctgaatcagcgccggaggaacttgctcatgcgccacttcattgcgcccatacactttcaaccgttcgctggcctcttctatcgtgaggccctgacgatggctgttcagccgcgccagtgtctcctccgggctatgaaaagcttccgcttcgatcggaaatacttttttatgctgcttatcattttctgacgccgggcgattgagtttccggttttcaatgttcatgtcagtcatgatgaatccccaaaattaaggtgtagtgtttcctgcatatcacgcccggggaatagcaaactcacgatttcaaggtgaatgccccgggagaattatctatgcataaaaaaggttattgcttactcactattttgagtgggttttattttatcgactcgggaatatccatcattccctccttatacgcctggcgtaatgttgcaattgaataaaaaactattattgactatcaatgctccagtgaattgcggtgatattatcgttatcacctattctggatataatcagttctcgcgttttacgataatcagcatgacccacgagctcggcacgaatttctttatagccctgttcctgagcggggaccgaacctaacccttgtaaacagatcgcggcctcttttacgatattcagtaaccactgacgaacctcgctttcatcttctttattacaggttactttcaggatataacgtttttctccctcggcggataccgggagttgatttatacgctgcgccgcttcacgcagtaaaatattggcgcaaagaataatgatcgtcgccgccagcgcatttttgaactgccctaagccgcataacacgccgatgcccgccgaacaccatagcgttgccgcagtgttcagcccgcgcacattcatcccttcgcgcatgatgacgcccgcccccagaaagccaataccagagacaatctgcgccgcaattctcccggggctgtctggcgatgtcgtcatggagctcagaataaaaacggcggcgcctgtcgccaccagcgcattagtgcgtaatcccgccatacgttgacgccattgtctttccgcgccaatcagcgcgcccaacagcatagcggccagtaaattcaaaatataaggaaacattaacatacgttcctccattttttctggaagaataagtacgtgctatatttagcagcacacgacaaatttctgccctgaggcaattagcgtcgtgttaacggcggaggaaataaagcgtgtttaaacatgaacatgacgattacctcgcgacaatgcgcgtgttgtaacattattgggatgacaatcgtcacaaggggagattgctgcccaccggttcggcaagcagcgcaggaatagcgtgcgttaacttgccagatgatttacgtaaaagtgactgtccaacatattactcctgcatgaatttgcgcttattatagtcagccaatatgttccgtaaagtgcaaaggcgggtttagtgacgttctgtttaagtttgtttgatattttttcttatgacaaaaaaatgacaatattatgtcgataacaagctcgtctgaaatcattaaacaataaattcctgcttaataccggcgatagctctgttatgatgcctgcacgtaaaaaaataaaacaacatgacgaggaaaaaatgggttccaccagaaaagggatgctaaacgtcctgattgccgccgtattgtgggggagttcaggtgtttgcgcgcagtacatcatggagcaaagccgtatgtcgtcacagttcctgacgatgatacgtttgttattcgccgggctgatactggtgaccttctcctttatgcacggcgataagatattttcgattcttaaaaaccgcaaagatgccctgagtctgctgattttctccgtggtgggcgcgctcaccgttcagctaaccttcctgcttacgattgaaaaatccaatgccgccaccgcgacagtgctgcaatttttatcgccgaccattattgtagcgtggtttgcattagcgcgaagaacacgaccaggcattctggtcttaaccgccattcttacatcgcttatcggcacctttttactggtgactcacggcaatccaacatcgctgtcgatctcttcaggcgcgctgttctggggtatcgcctccgcatttgccgccgccttttatacgacctggccttccaggctaatcgcccaatacggcacgctgccagtggtcggctggagtatgtcctttggcggccttattctgctgcccttctacgctaaagaaggaacgcactttgcggtgagcggcagcctgattctggcctttttctaccttgtggtgatcggtacgtcgctgacgttcagcctgtatttgaaaggcgcgcaactgattggtggccccaaagccagcattttaagctgcgcggaaccgttaagcagcgccctgctgtcgctactgctgttggggattagttttaccttgccggactggctgggcacgctgctcattctctcgtcagtgattctgatctccctcgattcccgtcgacgcgcgcgggccgcttaacgccgttgataatcacgatgaccgggcggaaaagggaaaagtttaatggcgctttgccttaatctcttcgtcagaaagcccggtaatcatcagcaccatctctcgctcgatcccctgttccagcatcgtatgcgcaatacgcaaggcttcctcctgcttaccttgatgtataccttgctgtatgccttgttgcacgccttcacgcttaccttttctgcgccccgattcacgtattctgtctacgatcgtcattaatctctccttgtgttggggaacacgacgcgccacctcgcggataaacttgccaaaacgaggcgtgctgccatgctgtattagcaaataattaaacagcgcttttagctgactgtcattagcgtttcccgtaatcagaagtaccgctaagcgctcgaccaatcccatcaggtcgcgttgacgtatatgcttttgtaccagctccagcatcgcgatacgtcgatgctgcataatctcgttatccggcaccaccgtaatgtctaccagtggaaatgccgtcgcataaagctgacgcgccagtgcaggatcgtcaaactcatccagccagcacagcgaaaagggatacgggcttttcgcgccatggtaaaacagcatgggaatcaccagcggtaacgttttatggccagcatccagatggcgctgcatcgcggcagtcgcgtaacgcattaaccggaacgccatatgcgcgtccggcgtactctgatgctctataacgacatagatataaccgtcgccttcacacgtttttagtgaccaaaggacatcggaataaaacgcgcgtaaatttttctcgataaaactgtccggcgccagtttcaacgtcgtcagatcgcaacgtattcttagcgaatggggaagatgaatattgagaaaatcccgcgcggtatccggatggcgtaaaaacgttttgaataccgcatcatgaggcgtggacgtggggctttttttcatggcgatccgtcacctgaggaataagatgacgccactgtactcgccaaaaatacagacagcattcaggaaaatttacccctgcgaggaggctcgaaagggaatcactgacggctgcaatacgtacatttttgcccagcctgctacgcattatcgcccaatagcgtaacgctaaccgggcctacaaatacacgtcatctgtaggccaggtaaacgtagcgctcttcggcgataaatctcacaccagcgctttgactatctccatcaaccgaatgacgtcttcggggcgcgtattgccggtttgcggatcgataatcgagctgtaaacatgcggcataacgcgcggcacgcctgcttccaggcaggtttgcaggataataccgaaattatccagtgagataccgccggtcggctcgataagcgtcatgccgtggcgggcagcggttgtcgccagcgcatagagttccggtaacgacttttcgccgcccatcgggaaaaacttcgccgcatgtgcgcccatatcctgcatcatgcgtaccgccgcttcacaggaaacgcgggctggcgttccctggctgctgctgacgccggtagaaatcaacacctcgccaggcgttcccgtcgggctgaccaaggcgttaatatgtgtttgctcgccgcctgtcgccgccagtgcgcccgctgcgaagccgctgccggtaaaagtctggttgacgtgggccgggtgagtatgggcggcaatcatcgccgctttgtagtactgcgccgggtcgcctgcgcccagtcccaccgagatagacggcacctccgccatccagcgtttcacctccggcacgccctcttctaccgtagcgaactgcgcggaaagtacgccaatgaccgcatggccttcggcggcttcatagatagccttcgcgttggcgatatcctttgccagtacgttaatcgctacccgctgacgataaaaattaatctgctgcatgttctgcaatctccctgagtcgcgccacaatcaatgccatttccccttcagctaccgtgcgtggatcgaggctaaaaaccccctgatgaagctgatatttgcgggcgtaaatcgctatctcgccgccgcgcagctgcgcttcgacgtcctgcgcgttcaaccccaattcagatgcgttcacccgcacacgaatacgccagattgcacgcccggcctcatcctgttcgatatcggcataaagcccatggatagcggaaatcgcttctgcgaccggctgtaactgtgctgcggtcacggtcgtctggccctggtggtaattctccagcgcatacaccagcccaaccatgttttccttgccgattttcattgctctggcaatcccctggtgctgcgctttgcaggcggcaatccacgttttcttaccagtgataaagccggaggttggcgcattaaaggctttcgcgccgctatagataaccatatccgcgccgctcgccacccagccgcgcaaatcctcttccgccgcggcatcgacaatcaacggcaggtggttggcctgcgccacctgtacaaaatcgtcaatgctcaacatgcctttctgtacgcaatggtgtgatttcacatacagtagcgcggcggtcttttcgttaatggcgctttccagttgccagcgggccgccagattgctcgaccccacttccactatgcgcccgccgccaagacgaatggcgctggtgactggcgcgccgtagtcaacgttatgcccgcgcagcatcactacctcattggccataccgctactgtccggcatcagggcgacgcgcgcccgctcgccgtgggtgatggcggcagcgacggcaatggcaatacccgccgaggcgcacgaggtgatatagctatcttcagcacccgtatagcgcgataccagttcgccggttttttccaccagcgcgtcaatctcgacgaaagcggaagccgcgcgcgcggtggcctgcatgacctccggcgcgacgcttgagacgcccagaatggtcattttgccgcaggcgttaatgacctttttcaaccccagttgttgatagatattcggcgtcatgatttacagcactcccaacaacgaacagactatgctcagtgcgacaatcgacagcaaaatggtggtgtagcgcggccctttttttaccagatagaagtagatggcgaataccgccgccagtggcagtaagcccggcgcgatagagtcgaggatctgctgaaccaccacttcagatcctttcaaagcgctaatttttaacggcgtggtgattttgacgtagctggcggaaagcgcgcccatcatgatcaaacccagcacgttggccccgtagatcagttctttgattcgccccccttgcagcaggccgataatcgaatcacgccccagcgtatatcccttgtggaccataccgtagctgatcgccagggtgatcgccgggtagagaatcagcgggataataccgcccatcgcgctgccatttgccgcgaacggaataaagatcgctatcaacagcggcatcaccgccgcccagataatcgagtcgcccatcccggcaagcggccccatcaggccagttttaatgccggtgatagacgagtcgttaatcggctcgccgcgcgttttttgttcttccatggcaatagagatgccctgaatcaccgcgccgaaggtctgctcggagttaaaaaagttaaggtggcgttttagcgcttctacctgctcctctttttgtgggtagagttttttgatgatcggcgtcatcgaggcgcagaaaatcaggctttgtaagcgctcataggagctggaaacctcggcgcccagccagtagataaaccaggctttggtgatatctgctttggtcagcgccccgctttcccgcgcgcgctcaaccagttcatgctgcattacgtcactgttcatcatgctgctccttcatttttcgccaggcctttaatcaggaaggcgacacaggtgccgaagatggccatcgccatgatgtcgaccttgaggtacaacaccgcgaagaacccgccgataaaccacggcaacaggctctttttaccgatcaccataatggtgatggcaaagcccagcgccggcagaatgccgcccatgatttcaaaggagtgggttaaccagtgcggcatcagtttaaggaaactttccaccacatcctggccaaagtagttagcggcaaagaccaccgggaagcgcagcaccagccccagcaatgccgggtaaagaaaggcgcaacgcatgatgcccgccatgtttgccgtttccgcgtgtttatccgccatatgcacccaggcggcgttcagcgtgcgcctaagctgatcgagaaacacgccaatcacgccaaacgggattgccagcgcgatcgccaggtttgggtccataccggccttcaccgcgataggaatggagatacaggccgccagcgccgggtccgacggcacgttgccgcccggcgttgaggtcacgcccaaataaacgagctgcatccctgcgccgatgatcatcgcggtctgcatattgccaagcaaaagcccgacaaataccgcgatcaccaccggttgtaacagcatcgcggagaaggtgtagccgaggcgtaaacgggcaaaccagtaatacaaccccatcaggcttgcaaagagtaaggtatccatagtgttatcctatacacttcatccttcaggctgcctctttgttggctgccttcgctcaccccagtcacttactttagtaagctccaggggattcactcagttgccgcctcgatgcatccagaatgattttgtgtctattaaagggttagaattttttcaggatatcgtcgagcggctgcggcttatcttccgggatggtctggaaaaatacctgaacgccacggtttttcaggtcgttaagaatgccgacgtctttttcatccagcgtaatattctgaaaaaccgccttgcggtttggcccgccgccgagaccgccaacctgaatgcgggtaacgtcaaagcccagttgtatggcgtcctgcaccgccgccagtgagggaaaaagcaccagcacgttaccgtcgccaagctgattttctttccatgcggcggcaaaactctggttgccgaagcaatccactttgatatttggcggcgcggccatcaggtagatatttttcataaacggatcggcatccagttcatcactcacaacggctatccggttcgcctgagattgtccgacccacttcgtgacaacctgcccatgaatgagacggctgtcgatgcggcataaaacgatattggccatgatgttttccttagagtgattgttgtagctgacgtacatgggcgaccacatccaggcagctactgcgcccggcctcaactaactcatccacgcaggcggttagcatcccttgttcgcgcctgtccagcgcctccagcagtagcgacgcattcagtccggcaatcaccgccaccggataatcggcgcttagccgcgccgcgacgttggacgttgtgccgccgacaaaatccgtcaggatcagcgagccttccggcagcgttttcaccacggcctcgacgcgttgataaaactcgcccagcgtatcgacaggcattagcgcgatttccgtcacgcctttaatttcgcccgtgaccatacgcaggctgttgcaaagcggttgtccccagccgccatgcgtcagcagcaggatgtggggcaacggttgtgtggtagtcaaaatggcctcctggcgcaattacatgagaacaccggcatatattgcccggtggcactgcgcttaccgggcctacagaacgctcccggtaggccggataaggcgtttacgccgctatccggcataacgcatcatcagaagagcaaaggttgtgccagaatttgtgtcacgcgaggaagaagaaaggtctggcgaggcgcgaagccccgccagtaaaaggattagctatagagcagttcgtagatataaaaatattccgcatccgataaacggatggcgtaggcgtcttcgatgggcagaaaagcggatttgatgacactaaacgcgcgcgcgtccagattcggctgactttccaacgccatctgtaacggttttcggttaatcacaatacgctctaccatacagcagcagtggatcaggaagcgcagtgtcacctggcggcttggtttcagggaaagcgaagacgtcagatggttaaaaacgccctccatctctttcagaatacgctgcgggttaagcacggaaatatggttgatgatactctccatcgttagcgcgctgataaagcgcatggcgctgcgctccatctccagacggcgttcagcattggacagatcgggcgttaacaggctcaacaccagttccggcccttgttcggagaaaagctcttccagcgaaataaacggaatatccggcagccccggctggaaagtgccgacaatccccgccagccgctcgctggcattcaatgcctgctgaacgcgctccagacttcgtacctcgttataatcaaggatcaccatcctggtgtcctgcgacatcagttcgccaaagctctcctccagcacctttttgattttttccgccgttcccatgccagtaatacaggagatgaccagcactttgccgccgttctcctgctgcggcgtacaaagctggcaggggatatttttactctgcaggagcgccgtcaactgtggtaagtcgctggtttcatagcttaaatccagcccgacttccagcagactggtcagcgtgatgttcggcatgagcaaaacatctatctggaataacttactgatcgtactgccgaaatggatcaatgagccgatgtccaccaacaggataagccgccgatattggcgggtttgaatcatttgggtcagcgtttccagcgtgtcatgcaccgactgttcaaacggcatgtcgatggcgctgaacaactcgcgctccagcacgcggttgacatattgcgcctgactggtggcggtggtcgcgccgtgggcgattaaaataaccccgcagtcggggctggcatcgatgcgctgacgataatggcggcactctttcaggaacaggcatagccagaccacttccgtcgccggacactgaatatgcagcagttcgttgattttccgacacagcagcgtggcgttgtcatattcgtctttgcagcgatccaggatcaaactggaagagtaaagctgcgggatcaggccgcgctgcacgtagcctatcagcgccaggaagtgtttacgcagtgggttaaccagattttccggcagcgaaaatcccaacacctgctctacgcagccaatcagcagcgtcacgcgctcttcaatctggtcgccatagcgcggcggatgcgccacgctgtcgcggctgtagagaccgtattcaaaaatcgagctgagtttatttttcaggatcgccagcgtctccgccggggggacgttactgttgcgcaaattaacatattcgcgcgtcaggaagctgtaaaagaggtcgctctcttcaatttccgccccggtcgccagcgacgtcttcaatgcgggcagcgtgcgcgcgtctatatttagccgcgctttaccgtcaaacagagtatccaccaatagacgctgttccggcgtcgggttaaccgacatctccgccagccgcttatccagttgtagcgtgtcgttatgctcggtcattcccgatgcccacgcctgagcgcagagaaactgaatatcgctttttagctggccgatattgccttccaggggtttattcagcaaccagagcaacaacggtttatcaatgctgaccgtgcgttctattttgcggctttcccgctgtaagaaccccacgatcagttcgatctgttcttcaacggagcgctggcgaatacccggcaaatcaatgcatacctgaatacgccgctggaaagtacgtaacagcgccgacccgaccggttcggtagtggcgcaaatcaggcgtaccgaaattgatcgcggctggctgctcacgccgagcggacggtactcgcctttatccagaatagagaacagcttttcctgcccttcataagacagacggtgcacctcgtccagcagcagataaccaccgtccgcctgctccacgaggcctgttttatgttcattcgcgccggtaaacgccccctgccgatgaccaaacagatgcgaggagagcagttccgggttatgggcgtattccgcgcagttaaagtagaccagcggcgggatagcgccgctcgcctgttcacaggcgaaacggtgcatcagttccgcaaaaaaggttttaccgacgccggacggcccggtaagcagaacgtgtaaaccgtgcggatagagcaccgccgcacggcctttttctaccgcatcgcgcaggctgcgatcgtaaccaatcaggctggtaaacggatcgtcgggcgcgtaatgctcttcatgcggcagcacatccgccaccgaccgcacttcgcgttcagactcttccagctgtcgtcccagcaacgtttccagcgcctggcgatgcagaaaatagaccgggcggccacggcttttgattgccaggccgtcattccataactgattgagatctttgctgacggagttacgcgccagcccaagattgaaacctatcgcctccgccgtaaacgccgtctcctgcgccaaatcggcaaggcatagcccgcgcgtcagccgttccagctctcccagtacgatctcaatacgtctcattacactaccgcttacgaaataaaagagtagtcagaacatacactattctgccacgcaagaaagtgaaggcgcagcgagaaaccgccttcccacttttgcctgacttcaacgccaacggatagcacgccccgatgagtgaacgtcgcacggtctacacttactcttgaaaaagtgcaaaccgataaggataccgtttatgaaacgaaaaacgcttctgcttattgccgcgcttgtcgcgctaccgggcgtcacgtatgccgactctccgtttagctcactccagtcggcgcatgaaaaaaatacgattttaaaggatttgcgcaaaatgtgtacgcccaaaggcgcgctaaccgatgaagcctgggagaaaaaaatcatggcaagcgaggggaaccagcagcatattcgggaggcgatgatcgcgatagagcgcaacaatcagcataactactggcaggctctcggcaaggtggaatgcccggagatgtagcacagcttttccgctttttggtcgcgaaaatgcggactgtaaccggtttctgttcgctaaaaccgcgtattctggagcgaatttacgcgatcaaggagtacgaaaatgcgataccgttttcccgataacttctggtggggcagcgcctgctcagcgttgcaaaccgaaggggatagtctgaatggcggtaaaagccagaccacgtgggatgtgtggttcgagcgccagcctgatcgttttcaccagggcgtcggtccagcggaaacctcaacgttctatcgccactggaagcaagacatcgcgctactgaaacagttaaaacataacagttttcgcacctcgctaagctgggcgcggctcattccagacggcgtaggcgaggtgaatccacaagcggtgagcttctacaatcacgtcatcgacgagctactggcgcagggcatcacgccgtttattacgctgttccattttgatatgccgatggtcatgcaggagaaaggcggctgggaaaatcgcgacgtcgtagaggcgtttggtcggtacgcgcaaacgtgttttaccttgtttggcgaccgcgtgaagcactggtttacctttaatgagccgattgtgccggtggaaggcggctatttgtacgacttccactatcccaatgtggtggattttaaacgtgcggccaccgtggcgtaccataccgtgctggcgcactcgaccgccgtgcgcgcctggcgcgccgggcgctacgacggtgaaatcggcgtagtgctgaatctgacgccgtcctacccacgctcgcagcatcccgccgatgtgcaagccgcgcatcatgcggatctgttattcaaccgcagttttcttgacccggtattaaagggagaatacccggcggacttggtggcgctgctgaaaacctatgaccagctgcctgcctgtcagccaggcgaccgtcagcttattgccgacggcaaaatcgatttactggggattaactattatcagccgcgccgcgtgaaatgccgtgatacggcggtgaatccgcaagcgccgtttatgccggaatggttatttgactattacgacatgccggggcgcaagatgaacccttaccgcggctgggaaatttacgcgccaggaatttacgacatcatcaccaacctgcgggataattacggcaatccgcgctgttttatctccgaaaacgggatgggcgttgagaacgagcagcgttttgtgcaagcgggacagattcacgatgattaccggattgactttatttctgagcatcttaaatggctgcataaaggcattagcgagggctgtcactgccttggctaccacatgtggacctttatcgataactggtcatggctgaacggctataaaaatcgctatggttttgtacaactggatttagccacccaaacgcgcacggtgaaaaaaagcggagaatggtttgccgccaccgcagagcataacggttttgattaagcgtttattattgccggataacgactaacgtcgtatccggcctacaaatggcagcaatatcaactcattggcgtaatacggactttcgccgccacgactaacgccgtcaacagcatcagacagccggaaagcgccagcggcgaaagcagcccgaaattgtcgagcgcataaccgcccactgccgcgccacaggtatttgccagttgaatcaccgcgacctggatggaaccggctttttccgcctgatcggcaagggaacgagtgatccacgttgaccatcccaccggcaccagcgcaaacgccagcccccagataatcgctatgaccgccgccacggttttgtcgcttccccacacaatgagcgtcagcgcgctcagcgccagtagcagcggcgcaccggccagcgccagttttaccgaacgtttcaggacgtaagaggagaaagaagtgccaacgaagctggcaataccaaaactgagcagcaccagcgtcagaccatcaacatcaaagcccgccagattcatatagaccgggcgaatataggtaaagaaagcgaactgcccggcaaaagacataaagatggcgatcatcccggccatcacgccagggcgttgcaacaggctaaacatattctgtttctggtgagaaggttcgcccggcagcgacggcagtgatttcaccacccagatgacgcacagtacgcccatcaccgcagcggcgttaaagacattacgccagccaataataccgcccaaaaaactgcccagcggcgcggcgatcactaacgcgatggagaccgcgccaaaaatcaccgacagcgctttcggcacggtacgcgcgggaaccagtcgcatggtcagcgacgccgacatcgcccagaatccgcccagcgccaacccaagacaggcgcggcccagcaatagcagcgtaaagctgttggcaaaggagaccatcagacaagaagccgtcagcaaaacggcgaacagaataacgatataacgcctgtcggtcgcctgaataatctgggtaatgaacaggctggaaaacatcgcgacaaacgccgtaacggtgaccgactgaccggcgatgccctcggagatccccagatcctgcgccatcggcgtcaacagactaacgggcaaaaactcaacggtaatcaggcaggcgacacaaaacgccacggcaaaaacggctgaccagttaggcctggcaaccccatcagcgcggaatttttctgcgatattttcattcattgtggttacctgcgtcgttttagtgcggaaaatccacgcagtgtaacattacaaaatgtgatctgattaacgttttagcaactgacattgttgcgctgcattttgcgaggctggtcgagagttgagaattatcttctctcgctgcgtgtaaaaccaaaaggtaagacatagtgtatcacctggtgctacactttagattacaggatgtcaacctgatgcgaaccttcaaaaccaggtggtttaacagagaagcgaagccccacacgataaaagatgacgagttaagcgaggccatcaacgccgtactgcaaggaaaagcagataatcttggcggcggggtttataaaaaacgtctcaatcaaaatcgcgatcgcgcaatcgtgttggcaaagggaggcgaacattggttttacaccttcctgtatgccaaacaggatatggccaacattcgctatcgcgaacttgcgggtttccgtgagttagcaaaacactatgcttgcctgaccgaagatcagataacggcactcattaataacaaagaactggtagaggtgcgccatgtcagcaaaaactaaattcaaaagccctgcctttgaagcgattcatagcgcggcatctggattatttagcgtggatgccattccccaggagacaatgcgcagttttgacacggcctgcttaagcagcatcaaagacctgcagccacttgaaataaaagcgttacgagaagaactcaacgttagccagccggttttcgctcggtacctgaataccagcgtatcaacggttcaaaagtgggaaagcggcgccaagcgtcccagcgggatgtcactgaaactacttaatgttgtccaaaaacacgggctaaaggtgctggtatgagggttttaccgatggtctgttaaggctaagtcggatgtctgggggtgggcaaattcagtgtgccactacaatgttttcatggtgcgcgcctaaacatttagagttgtctatagacaatcatgtacaacttcgagtttatgataagaaattttgagacaggaggtatggcaaggagtcacagttttagtgttcaaaacaagatcacatttccgtgatatatgtcacggaaatgaggagctacaagtctctgacgttttggcgtcgttagcggttattcggtgcgttacttctgtggctcacccttagcaaatacgatggcggctacgctttatttggctaacgatgaatcgcgccatccggccgttaatcgtggctcgccgcccttgccagcctcattcatctcgtcttttgttaacgagatagtgaagagtatcaatgcagccagtggacaccctcttccggctgaaaaaaggcgttatagcgcagttgaaacgcgttgatctcctgcatatcgggttccatttcgcgcaaaaagcccagcgccagccgtacctgcgtatcggtgatcggcgcggctaaacgcgctttttgcagcaaccgatgccaccgctgcaaattctgatcgccgccatcgacaatcaccatttgccagatcagtaacacctgagcggcattttgcaaatgcgattcatcagggcgatgcagatactgtaaaaactcaccgcccgccgttttacccatctgatcaatcatcgattctatcggcactacatcaatattcagacgttcgctcagacggcgaatcgcccggcgggtatccgatgtcagcacccgaaaacccacaataaacaccaccacaaacgtggccagaatcaaccaaatcatgcgcacatccgtcaccaaacaggatgcccatcataacggtaaatttataactgtcgacgttctggcctgtcaggatgtgatttattaacgcctgtcttcatttacgccagacaccggatgtcctgtctgacgaacgcaaggcataaaaaagcccggcgttaagccgggcaaaacgttaccaaatgcacacatttaagcgatattgacttgctgaatttttttctcacggcggattttgcgctcttccatcacggcgaccatcgccatcaggcagatacagccgatcgcggcggcgtccagcgcggcgaaggtgcccgcccagccggtcagaccaaaaacgggggtgccgtcggcaatcatgcccagacccagcttggcaaagctatcgccgataagataagcgaaggttcctttgataccgtccgcagcgccgatggcttttttcggtacgaaaccgactgccgccacgccaattaatagctgcggcccaaacaccaggaaaccgagcgcgaacagcgaggccagatagacatactggttgctggcgtgctggtagacgccgagggtggcgatgatcaacgccagcgccacacaggctaccagcgcgcgacgaccgttcgccaggtcagagagccagccccacagcaacgtgccgaccagcgcgcccacttcgaacagggtaaagccctgaatcgccacctcttttgaaagtttcagttcctggaaggcgtagacggttgaccactggtcgataccaatacgtaccacatacaggaagatattggagaaacacagcagccagatcactttgtttttcaacacatattcaacaaagatctgccacttggtcatttcgttttcttcagtctctttatcctcttcgctgatctcttcgccgaacagttcttcagctttgcccagaccgtaagactccggggagtcgctgccaaaacgcagaccgataaagccaacaatcagcgcgataatcgacgggaagataaacatgccgatgacgtgaccgtcgaacaggtagttggcgccgaacagcgccacgcctgccgcgcccgcgccgccgaggttgtgggagatattccagaagccgagaaaggtgccgcgtttacgacgcggagtccatttggtgatggtcgagtagctgcacgatccgccggtactctggaagaaaccgctcagggcatagaaagcgatcatcagaaacagactggttgaccccgcgcccatgctggcgctgaagccgagcatacagatagcggagaggatcaacataaacggtagaaactgcttggtatttttaccgtcagcgtagtaggaaaccagcgttttccccacgccgtaggtgatcgagaagcccaggccaatcatccccagctcggtcatgctcaacccgtaggtagaaatcatgtcgttctgcgcgatgttaaagtttttgcggatcaggtacatggtcaggtagccgataaaaaccaccagataggactgcatgaacggcttgaaccacattttacgccgcacatcgagcggcagatccagggtcggcttgcgcacctggtttaagaaggccagcatggattactcctgagctaatttttatacctgcgaatggcaggcattgtaaaaatccacaggaaaaggggcctgcgacagcgtccaggcaaaaccgggaaaatttcttagttttgccccattcagcgcaaaaaggtgaggtgcatcacgcttcgctggtctcgcgcggggcctgagcgttcagaaatggcagcagcaatagcgcagagatccccgccgcgatggcgatgaccgcaaaaaaaccggtccagtgccagatctccagtactttcgctaacggccagccggaaagcgacgcgccgagataggcgaacaggccgacaaagccggtggccgcgcccgccgcctctttatgcgagcactccgccgccgccatgccaatgagcatctgcgggccgaagacaaagaaaccggtggtgaagaaacaggccgcctgcatcacgtagctggcgaacggcatcagccacagcgaacccacagagagcaaaatcccggcggcgaagattaaattcatcggtccgcggttgccgttgaagagtttgtccgagccccagcccgccaccagcgcgccgataaatccacccagctcaaacatcgatactgccgtgttggccgtgaccaaatctacgcccagcgtctcggacatatacaggttgccccagtcgttgatcgccgcgcgcaccacgtacactaagacataacatagcgaaagcagccagatatagggattcaacagcacatatttagcgaggatttctttgcggcttagccccgcgccctcttgctgttgggcaacctccagcgcatcgtgccgccagtcgcctaccggcggtaaaccaatcgcctgcggacggtcgcgcagccgccagcagaggaccatgcccaccccgatggcaagcaatccggccaccatcatcccgacgcgccagccataatgcagggcgacagcggccataacgagagggatcagcgccccgccgacattgtgcgcggtgttccataacgcccaccagccgccgcgctcggtacgcgagtaccaggcagtcagcaaacgggcgcaaaccggcgatccaaacccctggaaaaaggcgttcagcgcccatagcagcgcaaaggcccacagcgaggtcgagaagccgaacagaatattcactacgccggtcgcaatcagcccgatgcccataaaatagcgagcgttagagcgatcgctaacgatgccggagacaaatttcgacaccccgtaggtgatgtaaaacagcgtcgccagcaggccgatatcgctgcgggtcagaatgccgctggcaaggatttccggcgcggcggcgttaaagcttttacgggtgaaatagaacagcgcgtaacccaaccaaatggtgatcaggatatgccgccgccagtagcgatagcgggcgtcaacctcgtgcttatcggtgatgagcggcgcgttggccggggcttttaaaaacgaaagcattatccttccttaaacgtaacgctggggcaacgagacgctcacccgcgtaccgtgggtacaagagatggttagcgtcccgccgagcgccgacacgcgttcgcgcattccggtcaggccgaagccctgctggtgagagcccggcggcaggccgctgccgtcatcctcaatcaccaacatcagccgctcatcctgctgccagccctggagcgtcaccgcgctggcattggcatgttttacgatgttattcagcccttcctgacagacgcgaaacagcgtcacgcgctgactttcactcagcgccgtttcgtcaattcgccagtcgaggtgactgacaataccgcggctttccagctccatttcgcgcagcagcgaacggatggcctgcgccagcgttaagtcgtctaactggcgcgggcgcaagcgccccagcaggcgacgcacggcgtcatacacgcccagcgaaagctgctcgataagttgcccgctctgcttcacgccgccgttatccgccgccagtcgttgcacaatgcccgcctgggttcgaatcgcggtgatggtctgtccgatgtcatcgtgcagctcacgcgcaacatcgcgccgcacgctctcttcggtctccagaagacgctccgccagccgatggttgcgcgccagctccttttgcaacgactggttcagctcgcgcaggcgctgaatgcccgcgccaagcagtagcccggtcaggctttgcgccaacagcgaaagtaataaatcgacgggatgatcgtgccaggtctggctggcgatcagcgcgatagcgttcatcagtgtggcaatgagcgcgccctgccagccataatgccaggcgagcgcgataatcggcaacgccaggcagaacggcgtgaagcgcgaaagttcagcaggtaaacccagttgcagccacagactgacgataaacagcagcagataccagatcagatgccgcccgcgccagtttaccggctgcgataccagcgatggtcccagcggcagccaggtagtgctggtgagatagtgccagaaaaccaggcagatgggggccagcgtcagaccacccgtgagggtcagcagtagcgcgttccatgccgcttccccctgccccagccagggcagggattgcagtagcgccgcggcggtgagggccgcgccctgaagcaataacgtgcgccagtcgcgctgatggcggtaacgtgaggttagcgccacgggcagtagcgtcaacacactaccgatcatcaaaagcggcagatgggccagcgcaacttcctgcgctaaccagtacaccagcagccactccgcgcccagcaatactggccagtatccgcgcggacattgcagcataagccccaggcgcaggccgaagggaaagagcagcgccgccagctccgggcgctctaccagatgcaggctgatactccacaggcagaaccacgcggcggagaagataaaaaagcaggcaacaacggtgattaaacgggaaaaaaaggtgttcattaccaaccgtcaaacatgcgatgcgccagttcaacgtcattgctgacgcctaatttttccagtagattcgcgcgatggacatgcaccgtttttggcgacagccccagttcggcggcaatctcttttaccgccataccctgggcgagtttttccgccacctgacgctcgcgtttggtcagcggatcttgccgacccgccgccagtttcacggcaatatcgggggtcaaatagcagccgcccgtcgccaccgtatgcaccgcggcgatcagctcatccggactacagcgtttagagaggaaaccgcgcgcgccggcgttcaacgcctgttccaccagcgccgggctatcgtgaaccgagagcatgatcgtcgccatcccttttggcagttggcttagcagctccagtccggaaatatccggcatcgagatatcgcagatacacacctgtacgccgcgccccggtaagcctgccaacgcttcgcgcccggaaccaaactcggcgaccacctgcaaatcaggttccagccccagtagctgtgcaaagccggagcggacgataaggtggtcgtcgataagggcaacggtgatcatgggttcatcctggcgctaaggcatgcctgatggcgctgcgcttatcaggcctacgggcaggtgccgttgtaggccggataaggcattaatgccgccatccggcaaaagcacttaccttaacgataagtgcctgggtgttcaagccttgagcggtcagacaatgcctgtcgtgacggtgaacgtccgggtttgctgcggttccagttgaagcaaggttccatttcgctgcgccgcgagaaaaccttcaggccgacaggtcgcgggcagggcaaaggcggcaacctgctgatcgccgttataaagaatccagcgggtcacgtaatttagctccgcgctggcgaaacgtgtcacgaacgtggtgccatccggggcgatcatactgaattccggggtatccgtgtatctgtccagttcatcggcgaagaacacgatttccgggtcataaaagccaggctcgttaagcgttgccagcgaggcttcaccctgcaaaagccgttgattaaacgccagccactgcgccgtgggtttgacatgcgccggcaccgactcgcgtagcttcagcgcggtatccgggatattctggcggaacgtggcgttcggcacataggcatagttcatgtggcacatgtactgtagcggcatggcgactgaagccaggttagtcacggtcatctgaatatcaaacagcgcgcttgatttacgcattaccaccgcaggttgcgcctgataatgatgaccgaaccccatcacatactcgtagcgcccggtcacgcgcagactgtcgccctctaactccagccaggcgtcgtccatagcagcgcagggcatctcgccgtgcagcggatgtgtatcttccggcgacgggcagccattcgccaatagtccggaatggaaagcaaagcaaccatacgttgccaccacttccgcagccggcttcggctggcggaacatgttgcgcatagtcaggtcatgaccgtcaaactgcgcgtcccaaatcatctgccccatccagggcagaatcaccagatgaccgcggctgttttgtattttcaatccttccacgccgctggcgtaacgaaacgccgtaaccgtaaaatcgtcattttccagcaagatacgcggctgctcgctaaaaagctcccgccataatgtaatacgtattgtcatggttgatctcctcaggacgcggcgacttcagccaggttgccgcgcactttgctttcgcgccagaagtaaacgccaacgtaaacaaagcacagcatggaaaccaggaatgagagctgtagcgagtggaacatgtccgccacgtagccctgaatcgcgggaaccaccgccgcgccgacaatcgccatcacgatgaccgcccccgccatttcggtatgctcgttatcgacggtatcgagcgttccggcataaatggtcgcccagcaggggccaaacagaacactgaccagcaccgccacgtataccgcgctaaagctgggtgccagcgccacgtaggccaggaacagcgcgccgatcacagagtaaaggatcaggactttttccgggttaaagcgtgtcatcagaatgttggcgataaacttgccgataaaaaagcaggcgaagctgtagaccataaaggttgaggcatcgcgctcattgatatcgcctaactccagcgccagacggatagtgaacgaccagaccgccacctgcattcccacatacaggaactgcgccacaataccgcgacggaaacgggcgttgctggcgagatagcgtaacgtatccagcgccgaggggcgtttatgactcgcggtttgcgcgactttacaggtcgggaaacgcgtcagcaggaacagtaccatcaccactaccagaaccataatcatgtacttatagggttccagagtgttttccagcatcagcaccttgaagttgtggacttgctcggcattcatgcccgccatctgtttttccaggctttccccttcggaaaagaccagatatttacccaataaaattcctgccgccgcgccgatcggataaaaggtctggctgatattcagccgcagcgtggcgtaggctttcggcccgatcatcgaactgtaggtattcgccgccgtttccaggaaactcaggccaatcgcaatggcgaaaatcgccgcgaggaacatggtgtaggtcgccatgtgcgacgccgggaaaaagagcgtacagccgacaatgtatagcgtcaggccgataagtatcgccactttataactggtttttttaatgaccagcgaggccggaatagcaattaaaaaataaccgccataaaaggcgctttgtactaatgccgaagcaaagttgctcagcgaaaatacacttttaaattgcgtaatcagaatatcatttaacgcggctgcgcatccccataatgggaataaacaggataacaaaataaactggaacagaggtgtcttattcagatacccgtcgggcatctgaacgatgtttttatcgttcatagtgctacctttaacagtgcagggtgattgttattcgttcaacgaaagatactcattaaattgttcaatgcttggataagaggattgggtgcctttcccggtgacgctgaaagcggcaaagaggacggcttttttcatggcggcttccacatccccgctctggacgtagtaatgcgcgaaacagccgataaaggcatcgcccgcgccgctggtatcgacagcgttcactctaaacgccgggacatggacttcctggtcacgcgtcatccacagcgcgcctttctcacccatggtgacgataatattgttcagccctttatccaccagcgaacgtgccgctgcgcgaatatggtcataggtatccactggcataccggttaatatttccagctcggtttcattgggtacaaagaaatcgcatttacaggcataagacatatctaattcccgtaatgctggcgcagggtttaataacacttcaatcccatgtttcttgccaaattctattgcgtgataaaccgtttcaagctgaacttccagttgcagaacaataagctggcatttttttaaatcttccgccgcgcgatcgatatcttccggcgagagaaacttgttggcgcctttgatgatcagaatgctgttgctggagttggcgttgacgaaaatcggcgctacgccgctgctggtacacggtactttttctacatacgtcgtattgatcccccaggattcgagattacgaatggtgttgtcggcaaaaatatcgtcgcccactttggtcaacatcaatacttttgaattgagcttagcggccgccacggcctggttcgccccttttccgccgcagccgattttaaacgccggcgcttccagagtttccccttctttgggcatctggttggtgtaggtgataaggtccaccatgttagagccaataaccgcgatatccattttactccctctcagaaatcgtcacacgacaatgatattaaaataacattatcatgttacttccgtatcatttgtgactatgatcgcgattagaggatcattttgccatttacttcgtgaacaacccctggcggaacatacgcgcattaaatcatttttagggttacaatttactgaaaattaactatttattgttataaaacgcgaataaacccacttttatttcctgacagccggacgtatagtagtgccacactgtaatgttctcagaaacacataaatgttactgatggaacataacaacatgatttgcggagagggtgaatggagaccaagcaaaaagaacgtatccgacgcttgatggagttactgaaaaagaccgatcgaatccatctgaaagacgccgcgcggatgctggaagtttcggtgatgaccattcgccgcgatctcagccaggatgatgaccctttaccgctgacgctgctcggcggctatatcgtcatggtaaataagcctgcgtcttcaaccaatatgccgctgccggcgaaaaagacgcatcatcgggacgaccttcccgttgcgatcctggccgccggcctggtgcgtgaaaacgatctggttttttttgataacggtccggaaatgccattagttatcagcatgataccggatgatattacctttaccgggatttgctactcgcatcgggtatttatcgcgctgaatgaaaagcctaatgccacggcgattctgtgcggcggcacctatcgggccaagagcgatgccttttatgatgccaataatccttcggcgctggattcgctcaatccgcgcaaagtgtttatttccgccagcggcgtacatgaacattttggcgtgagctggtttaacccggatgatcttgccgccaaacgtaaagcgatggaacgcggtctgcgcaaaattttgctggcgcgtcacgccctgtttgatgaggtcgcgcctgccagcattggtccgctttctgcctttgatgtcctgattagcgatcgcccattaccgacagattatgccgttcactgtcggaatggttccgtcaaagtcatcacgcctgattcggaaagtgaataacttactcaaaaaagacggcaattttattgaacatggtgggatcggactggtttcgtaccaccttcgccacgtcttccagtttatcgatctgactgatcatctgttcaagtcgctgatcgtcattgaccagaagccagatgcggctctgatcgctaccctgaatcggtaaacagagaataccctcaacgttgaaagcgcgtcgggcgaacagcccgcagacgtgggtcatcacgccaggatggttgcgaacggtcagctccagaataacgttatcatgtgattgtttctgcatggcttattcccccaccatctctgtatttgccgcgcccggcggcaccatcggatacactttttcttctgcatcaatgcgcacatggatcaacgccggtccaggacgacgaatgatagcctgcaacgccgcctgcggatcggcttcgttattcaaatcacaggtgtccagaccaaacccggcggcaatctgcataaagttgatgcttcccggataggtcgccgcaaaaacgccctgtttatagaacagactctgttgctgatgtaccagtcccagcgcgtcgttattcatcaggatgattttcacatccaactggttttcactggcggtagccatctcctgaatattcatcatcaaactaccgtcgccggaaaaacacagcaccttgttgcccggattcgccagcgccgcgccaatcgccgcgggcagaccaaaccccatggtgcccagcccgccggaagtcagccactgacgcggacggttgagcggataagcctgcgcggtccacatctgatgctgacctacgtcagtggtaataatcgcgttgtcgtccacacaggcggcgaccgcgttaatcagcccatagtgactaagcgggttattttcctggggaatactgcaagggaattcttgctgcaagtccgccaccaactgatgccatgcttcccgcggctgtgcctcgatatggggaattaactgtgccagtacatcatcgacatccgcctgaatagccacatgcggctgcttaattttgcctaactcggcgcgatcgatatccacatggatgattttggcgttcggacaaaactgctccgttttgccaatcgcccggtcatcaaaacgcgcgcccaggacaatcagtaaatcggcctcttgcagaataaaattggtactgcgcgcgccgtgcatccccagcattcctaacgacagcggatgcgccttaggcagcattcccagcgccattaaggtcattgtcgtcggcagttgcgctttttccgccagttcgcgcacgcgtgtcggcgcattgatcacgccgccgcccagatacagcacaggacgcttcgccgcgttaatcattgcggcggcctcgcggatactctccgcgctaaactccggcgggggtgatttttccgccggcgacggcaacgcatccagctcaattgtcgccgtctgcacatctttaggaacgtctatccacaccgggccgggacgtcccgactgcgccagacgaaaagcatcgctcatcacctgaggcagctcgttgatatttctgaccagatagttgtgcttggtgatggggatagagataccgtaggtatccacttcctgaaacgcgtcagtaccgatcatggacgccggaacctgcccggtaatacagattaacggaatagaatccaggcgcgcatcggcaatggccgtgaccagattggtcgcgcccggcccgctacaggccatacaaacagcaggtttaccctccgtccgcgccatcccctgcgcaataaaccccgcgccttgttcatggcgcgccagaatatgacggatttgcgtgctttggcttaacgcgtcgtaaacggggaggatcgaaccgccgggaatgccggtgacgatacgaatcccctggcgctccagaaaatgaacaataaattccgcgcccgtaaagcgctgaggtgtagatgttgtgcccgaacttgccatgctccattccttttattctgagccgacgttccgggaaggtgtcttaaacaaaaaaccccgcccggtttgcgccggcggggttttggaatcgtgtgtgttccggaccctacggcgcattgccgacgaccaccaccacacgcacgacgaccactgcgcgagatggcgcagttgttagtagggtcgcgttcagcatggaagggttcattaggggccttgtctgtttgttattaacacgttttatacaagcacagcgctttcagcatgacaacggaaaaattttcatctgcacaaaaatgcgtcatcgatcacatttttctacgaatttacacgctttgagtataggcgtaataagcgtagcgccctccggtaatcgccgggattgatgattacgcgtttcacaatgccggaaaacaaaaaacctcgccgaagcgaggttcttacagcgtaatgcgggtggtagccgcgaagcacactgtgttatgtcaacagcagaagtatacgcgttctgtgcagaacgcgcaatttcggcgcgaattttgatgaatttgagtatggatcagaagctccgttctgtctataaattactgttcatttatacagtacttaactataatgtctttgacacaatgtgttatgcgggggccgcatcgtaaaccggcgcaacgaagtcctggctgaaacgggtggtgccgtcagcgccttaaccccctcgtgagcacactgtgttatgtcaacacgcacactattcctcgcaaaagggatcgcgtgcgcaacagctggcaacaggcagcggaaaggtacgtcggctggcagtgctccttaaccacaggagacgcgtatgagcgtagtggatatcaccattcttatcctgaaactcattgttgcagcactgcaactgcttgatgctgttctgaaataccttaagtaattcagattcaagccgcaccgaaggggagcgggcaaccgctcccctttcaccttatccgctggtctttcgcttcccgggtatgttacgtttttatgacaccctcaacgacgcctgacgctatgaccctttccgttttctgcattttgctgttcgccgcgctgctacatgccagctggaacgccattgtcaaagcgggaaacgataagctctacgccgcgatcggcgtcagcggttccgcggcggtcatggcattgatccttttgcccttctcgccgcagccagctcacgccagtatcccttttttagcggcctctaccgcgctccaggtggtgtataccgtcctggtggcgaaaacctatcaggtctcggacatgagccagacctatcctcttatgcgcggcaccgcgccgctgctggtggcactcattagcgttctgtttcttggcgacagcctgtcgtcgatggcctgggtcggcatcgcagtgatctgcatggcgatacttgggatggcctgtaatggccgcgccagctctcaacgtggtgtcgtgctggcattaactaacgcctgttttattgccggatatacgctggtggacgggaccggcgtaagactctcagaaacggcgctgggctatacgctatggtcattttttctcaacggcgcctgcctgttaacctgggcgatgattgcgcggcggcgggaagcgtcgcgttatctggcgcaacagtggaaaaaaggcatttttggcgggattggcactatgggatcttatgggctggcgctatgggccatgacccaggcgccgctggcggtggtcgccgcgctgcgtgagacgtcgattttattcggcgcgctgatagcctggctgttgcttaaagagaaagtggccgggctacgtctggtggcggcaggcgggattgccctcggggcgattttactccgtctgtcatgattgcccaataacagccacagacgtaacacattctcggcaacatttgttgccgcttttgtttacatatcctgccgttccttcgtctgccattgctggttgctgtctggccttctttttctggtgtgatagattcctctcgcatttatgggaatgcgcagcaagttattcttattttttctttttttgaaaagtaatcagcgaaatgaaaaggcagagaaacgtcaatttgttgttgatgttggtgttactggtggccgtagggcagatggcgcaaaccatttatattcccgccatcgccgatatggcacaagcgctaaacgtccgggaaggcgccgtccagagcgtaatggctgcttacctcctgacctacggcgtctcgcaactgttttacggcccgctttccgaccgggttgggcgccgccccgtaatcctcgtcggcatgtctatttttatggtagcgaccctgttcgccatgaccacgcatagtttgacggtgttgattgccgccagcgccatgcaagggatgggaaccggcgttggcggagtaatggcgagaacgctcccgcgcgatctgtatgaaggaacgcaacttcgtcacgccaatagcctgttaaatatggggattctggtcagcccgctgttagcgccgctgattggcggtctgctggacaccctgtggaactggcgcgcgtgttacgctttcctgctggtgctttgcgctggcgtcaccttcagcatggcgcgctggatgccggaaacccgccccgccgccgcgccgcgtacgcggctgatcgccagctataaaacgctgtttggcaacggcgcatttaactgttacctgctgatgctaatcggcgggctggctggcattgcggtctttgaagcctgttccggcgtgctgatgggagcagtattaggtctcagcagtatggtggtaagcattctgtttattctgccgattccggcggcgttcttcggcgcctggtttgccggacgcccgaataaacggttctcagccctgatgtggcagtcagttatctgctgtctgctggcaggccttatgatgtggattcccggctggtttggcgtgatgaacgtctggacgctactcatccccgctgcgctgtttttcttcggcgccgggatgttatttccactggccaccagcggcgcgatggagccgtttccgttcctcgcaggcaccgctggcgcgctggtcggcgggctgcaaaatattggttccggcgtactggcgtggctttcggcaatgttgccgcaaaacggtcagggcagtctgggactgttgatgacccttatgggattgctgatcctggcgtgctggctgccgctggcgtcacggatatcgcatcagggacagacggtttaacgttcccctcgcccggctttttgccgggcgtttcacattccggcgcgatcatcgcattgagcaggggctcctgcgccggacgccacgctccttcttcgccgtcataaaactgagtatccgcgtttatcgcatacgggatatgcgcttttttcagctcgcaggccataaaacgggcaaacgcgaactgtgaagcgaccggcgtcatttttatcgactctcccggcgcccatccgcccacccagcttgcatggccggtcttatgctgccagcgaaccgcggcattaatccgtgcccgaatcgccgctttttccgccgccgtgcctgatgtccacggatatttaccgccgcttttcagggggccccacgggaagatgtgccactccgccagtacatagttctggctttgcgccggcagtttaagcgccgacaaatcctccggcgcggcgcgcatgcggggggcaacgaaaatcatacgctgtggatcaatggcgtgaatcaggcggatggttttgtcatatacgcgattcagcgacgccatattatgattaagtttgtcggcaggctcataaatgagatcgaaccccagaagcggggatgtctggccaaaatagcgcgcgaccacgctccaccagttgatcagctccttttcatggctggcgctgggatcggttttatacgcatccgcctgataggcaataatgggtatgacgccatagtattcgcaggcttctaccagcttacgcaaatggatgaggcgcgcttccgtcggcgcgcctgccacacgaatacggacatgcgttaacccttttgccttaaaatcccgcacgaccaacggatcaaactcacgaataccccgttccgttcgcgcccagtcaacatccatcccaacgccaagctgctgcgcatagcgcgccgccgtcaaaggcatcggtttcgcatagacgaccgcgctggtcagcatgagagaggcaataagcggtttaaacacgacgccccctaaaatttttaccacggtgatagcaggtatttagcatattcactcccggcaggtgtagcgacaaagcgtaataaatcttcacacctgttcctgcaaccagcgaataaatgcctcgattttcggccactgcctgccaggcagagtggtgacataataatgctgatgacatttcagcctcatgtcaccaaaaggcgcaatcagttcgccgctgtcgagacgcttttgcaccagccgtttacgccccatcgccacgccaatgtggttcatcgcggcaatcaccgctaaatcagaacgatcgaagccaatgccggatgaatccggcaaatttaccgcaaaatgctgcgcccaactgtgccactcatcggtgccagaatcgttactccacgcctgtctgtcgtgtaagagcgtacagtgccgcaggttattcaggttgtcctgcaaggcgaaacgacgggcgtaatccgggctgcaaacgggcaaaatcgcctcatccattaaaaaatggtgcgtgagctgcgccgacggcgcatcgtcaaaatagatagccaggtcaatgccggcacgctgtaggttaacgttatcgttgccggtcagcatagtaagagaaattgacggatagcgacgggtaaagtcccccagcgcgggcaccagccagcactgggcgatagagggacgggaatacacggtcagcgtgccggacagttcctgatttttgatatcgaggatttcctgattcaacgtatccagcgacgatttcagcgcccagaatacccgtttgccttcatgggtaagctccactttacggtgagagcggacaaatagctggattcccaactcggcttccagttgattgatacgatggcttaccgcactggggcttaacgacagctcatctgccgccagagcaaaggactggtgtctggccgcgacttcaaaagtatagagtttggataactgccagccgttgagtaagcggtttcgggtatcgcgaaggggttccatggcaacctcagtcatcttttaatttcccgaagtgtaaaaaaacacgctgaaaaaatccgcacatagatgaagcaaaatgaaccatatcgcaaaataaaggcaatattagatggaaatcacatagttgattcaatttacatcatgtgaatggcaaattatatcgtttgtcagggtgtgctgtttttctgtccaataagaacagattaatcacagggtaggtgagatatgcacgctcaaatctgggtagtgagcacgctgctgatcagcatcgtgttaatcgtattgaccatcgtgaagtttaaattccaccccttcctggcgttactgctcgccagtttctttgtcggcgcgatgatgggcatggggccgctggagatggtcacggcgatagaaaacggaataggcggtacgctcggttttctggccgccgttatcggtcttggcaccatcctcggcaaaatgatggaggtttccggcgcggcggaacgcatcgggcttacgctccagcgctgccgctggctctctgctgacgtgatcatggtactggtggggctgatttgcggtatcacgttgttcgtggaagtgggcgtcgtgttgctcatcccactggcgttttctatcgctaaaaagacccatacctcgctgctgaagctggccattccgctgtgtaccgcgctgatggccgtccattgcgtggtaccgccgcatccggctgcgctgtttgtcgcaaataaactgggggcggatatcggctcggtgattgtctacggtctgctggtcggactgatggcctcattggtcggcggcccgctgttcttaaagtttctgggtaatcgtctgccgttcaagcccgtaccgacagagtttgcggatcttgaagtgcgcgccgaaaacaccctgccgtcgctgggcgcaacgctgtttaccgttctgctgccgattggcctgatgctggtgaaaaccgtcgctgaactgaatatggcgaaagacggcacgttgtatacgctgctggagtttatcggtaatccgatcaccgcaatgtttatcgctgtctttgtggcgtattacatactcggtctgcgccagcatatgggtatgaacgcgctacttacccacaccgaaaacggctttggcgccattgcgaacatcctgctgattatcggcgcgggcggcgcgttcaacgccattctcaaaagtagcgggctggcggacacgctggcggtgatcctctcaaatatgcatatgcacccgattctgctggcgtggctggtagcgctgattctgcacgcggcggtcggctctgcgacggtggcgatgatgggcgccaccgcgattgttgcgccaatgctgccgctctatcctgacgtcagcccggagatcatcgctattgccatcggttccggcgccattggctgcacgatcgtgaccgattccctgttctggctggtcaagcagtattgcggcgctacgctgaatgaaacgtttaaatactatacgacggccacgtttatcgcatctgtcgttgcactggctggcacattcctgctttcctttatcatctgatcgtaaagagacgtactatggaaaacatacaaaagctcatcgcccggtatcctttggtcgaggatctggtcgccctcaaagaaaccacctggtttaacccgggcgccacctctcttgcacaaggtctaccgtatgtcggcctgacggagcaggacgtaaacgccgcccatgaccgtctggcgcgctttgcgccgtatctggcgaaagcgtttccgcaaaccgctgccgctggcggcatgatcgaatctgacgtggtcgctattccggccatgcaaaagcggctggaaaaagagtatgggcaaacgatcgacggtgaaatgctgttaaaaaaagacagtcacctggcaatctctggttccattaaagcgcgcggcggcatctacgaggtgctaacgcacgcggaaaaactggcgctggaggcgggtctgttaaccaccgacgatgactatagcgtgttgctttcgccggaatttaaacaattcttcagccagtacagtatcgccgtcggttcaaccggcaatctggggctatcgatcggtatcatgagcgcctgcatcggttttaaagtgacggtacatatgtctgccgacgcccgcgcctggaaaaaagcgaagctgcgtagccacggcgtgacggtcgtggaatacgaagatgattacggcgtggcggttgagcagggccgtaaagcagcgcaatccgatccaaactgtttctttatcgatgatgaaaactctcgcacgctatttctgggctatgcggtagcgggtcagcgtctgaaagcgcaattcgctcaacagggacgcgtcgttgacgccagtcacccactgtttgtttatctgccgtgcggcgttggcggcggccctggcggcgtcgcctttggcctgaaactggcgtttggcgacaacgtccactgtttctttgccgaaccgacccattcaccctgcatgttactcggcgtttataccggtctgcacgatgccatctcagtacaagatatcggtattgataacctgacggcggctgacggcctggcggtaggtcgcgcttcgggctttgttgggcgggcaatggagcgtctgcttgacggcctttataccttagacgatcaaacaatgtatgacatgctgggctggctggcgcaggaggaaggaattcgactggagccatcagctctggcggggatggccggaccacagcgcatttgcgccgccgccgcgtatcagcaaaggcatggattcagtcagacgcagctcggcaacgcgacgcatctggtatgggcaaccgggggcggcatggtgccggaagatgaaatggaacaatacctggcaaaaggacgctaatactcactcagtgccggaaagacggcagcgccatccggcacgccatcgcctgatggcgctacgcttatcaggcctgtgacgttaacgcagcatcgccatcaactcctccggcgagcgatgctgcttcagtaaatcccgcatcacccgcatatgcggcgaggagtagttaaaaaaggtctggtagccctcgcaaagctgatttttcccctggctatcccgatgctcagggcatccgccgccgcaaaatcgtaataaagagcacttctgacattcagcgcttagcggcaccttgtccggcgcttcagcgccattcctgccgccgcaccactgctgtagcgtctcatcaaaaaggcggaccgagatacgctgaatatcttcacgtacccaaatatcaaatacgctatttaaaaaccgcccccagtctgctgaacacaatgaatcctcggtcaacattccgttccggtcatgttccaacaatgggataaaatggacattgcgaatgccgagccgttgtaagttacggtacagttgctgagggcgctggctattctggcgatttacgacgacctgaatctggtcatcactcacgacaatgtcctgacgtcctgtcatataaaattcccgataaatgcaataagttggcgaatatgggtaacagcaaacaggattgcgagcgacaacaccgcgagggagatcaaaaatttgtcacgcatgacatgagtttcggaaaaatcgctatgcgcgacatccatcaaattacgactcagggtataacgccaaagaatcaccgccactatcgccagaacgctgattgacacccagaacaagaaccccgcctgatgccagtggtgcctgacggctaacgccattaacgccccgtatcccagcagcgtgcgaaaccaggccagcgacgtacgctccggttgcagtcccggatcgttctgccgacgggctttacgactatccggcatacagtaccagccccatcactatcaccgcgacaatcatcaaaataacgctgatgatcaacaggctatgggtatagggcaaatcctctttcaggcgcatcgctttttcattacgtaaccagcgtagatagccataaatcgccaggccgcccgcaaacagacacaacaatagcgccagcagttcacggatcaccggcgtggcaaaatccggggcgagctgatcaagaccgacgcctgccgccagaaatcccagcgaggtgcgaatccacgccagaaaggtgcgctcatttgccagtgagaagcgataatccggcgcttctccgaggcgggaaatcttcatgacgactccttttacgttcttatgtattcccgttcgttttcagaataccactcacgttgttgctgatatgcttcacattatcccgcagcaagggaatcttattgcaaaataactgtagttcactggtgacgcgtttcggcgcaaccgcgctcattcccgctatttttcatttcagttgcgacctttttcaacgccaccgccaggaaaggcattattgccgaattaaaagctgaaaaaccacccgtcgcgacgaaaaaaaaggcgatgaagattgataactaactgaaaaaaattggaattatgctcgttgccattacgctgattagcgcgttcattgaggaagaagataagaagaagagcagaagtgtggccggtgcagcgcgcgttatccagcctggatttaacacagtgcataggccggataagcaacgcgccatcaggcgctaacccattccccaaaaaatcaccgccagcagttgtggcgtgataatacgcaggaacatcactaacggatagacggtcgcgtaagagagcgccgccgcgccgctggtggcatgaagattgttggcaaatgccagcgctggcggatcggtcatcgaaccggccagcatcccgcacagcgtcaggtagttcattttggcaaaaattcgcgccagcaaaccgacggtaatcagcggaatagcggtgatgaaaataccgtagccaatccagcttaatccttcgccctgtgtcagcgtatcgacaaaatcgccgccggatttcagcccaacgaccgccagaaacaaaacgatgcctaattcacgcagcgcgaggttggcgctcggcggcataaaccagtacagcttaccgatgctgccgatacgccccaaaattagcgccatgatcagcggcccgccagccagccccagttttaacgcgaccgggaatcccggcacaaacaacgggattgacccaagcagaacccctaatccgatgccgataaacaccggcagcatctgcacctgctggagtttttgctgcgcgttgccgaccacattggctaccgcatcaatcgaggctggacgccccaccagattgagaatgtcgccaaactgcaggctagcgtcactactggcgaccagctcaacgcccgcgcggttaaggcgggagataaccacgtcataacgctctttaaagtgcaaatcgcggatacgtttgccgagcactttttcgttggtgacgaccacacgctcgacgcgtaaatccgtgccacgcgtcgacaacgaggtgtccacttccttaccgatcaccagttgcgcgttatgcaggtcggtaggttggccgacgaggtgcagcaggtcgcctgcctggataatcgtccccggcgacggcaccatcagcgtgtcatcgcgtttcaggcgtgagcaaatgattttatcgctgttcaggatcggcacatcctggatagccatattattgaggttcggattctcgacacggatattcattgtctgaattaatgaatggccgttagcgagagaggattcgtgcttctgcgcctccgcctcgacgttaacgcgaaaaatcagccgcatcagccacatggtgagcaaaataccgcagatgccaaacggatacgccatcgcatagctcatccccatctgatctaccagatccactggcgttcccagatcgcgcaggatttgctgacccgcccctaacgcaggcgtattggtgactgcgccggagaaaatccccagcaccactggcagcggaatagcgaaaattttatgcagaatcgcggtgaccaacccgcccataatcacaatcagaacagcaaacagattgagacgcagcccggaaacgcgcagcgaggcgaaaaaccccggccccacctgtatgccgatggtataaacaaaaaggatcaggccgaattcctggataaagtgcagcatatcgccgctcagcgtcaccccagcctgatcgacgaagtggccgacgataataccgccgaacagaacgccgccaataccaaagccgacaccgcgcactttaatgttgccgatccataaaccgacaaccgccaccaacgccagaacgctgaccgtcaatgcgatatcactcatcttttcttccctgtgagtaacatttcaatttatagggattatgactgaaccgttaaggcatatatacagcatggcgcacattctcatgttacaaaaccgcccagacgtcctgacttcggcagcgtcttaccctttttcgtggcacaaaaaagccccgccatctctggcggggcaaggcaaggagctcattagctatttaatgcggagcgttcgttaatggcgatacgctgcggcgcaatggtttccggctcgttacgggttaaatcaatatgcagcaggccgttggtaaacgtcgcgccggaaacttccatattctcagccagcgtaaagctcaggctaaaaggctgcatgaccaggccctgatgtaaccatttgggctcgttttccggctgttccggcgtacctttcaccgtcaggcgcgtgccttccagttgaatatccagatcttcctgacggaaaccggctaacgctaaggtaatgcgataatggttatcgtcgcttttttcgatgttatagggcgggaagctctggctttcgccgctgttttgcagcgcattggccagcttgtcaaaaccgatccattgacgcagcagtggggataaatcgtagttacgcataatcatttctccttctaagaagcgagtttttaccttcacactttacgtgcgaatatgctccctgacggcgagcatgggatgacaggccgcgcaacgcgacccgacggaatcagttaatttcgatacggcgcggtttgttcgcttccggaatcacgcgctccagttcgatatacagcagcccgttgaccaggtttgcgccgcgaacgtgaatgttctccgctaactggaacttacgttcaaagttacgctcggcaatgccctgatacaggtaagtacgttctttctgctcgtccgcatgagcgccttttaccaccagtaaattatcctgggcagtaatctccagttcgctttccgcgaaaccggcaacggcaatggcgatgcggtagtggttttcgtctaccagctcaacgttgtacggagggtagccgccattactttggctttggttattttcaagcaggttaaacagacggtcaaaaccaatggcagaacggtacagcggggataaatcaaagttacgcataatcataaactcctgaaatcagcgagaatgtcagaccttccatcatggacaggccaggattgccagaacacccatcaggcgtgcccttctattcactacgtcttataaatgggtctgaatacgtacttttcaagtattttaatccgacttttttttgcagtttattggctattgcatagactggttgggacagcactgattgttaaagtgcgattaccgccacagtgccacgtactggtgatgttatttttagcaacggatcgctataactcatcatgcaaataacgacaaccaacagatgaatgagtgatgataaaaaacgtgtggttaacgctgataatatggaatgggatgcttttattaggcggttgttcaagcgtcatgtcgcacaccggcggtaaagagggtacttatcctggcacgcgcgccagcgctacgatgatcggtaacgatgagacaaactggggcaccaaatcgttggccatcctggatatgccgtttaccgccgtgatggatacgatccttctgccgtgggacatcttccgcaaagacagttcggtaagatcgcgcgtcgagaaaagcgaggaggagacgaaaatgaccaatgccgtcatccccccggcgaagatgcctcctccctgatttatcgcccggtttccgtcacccatagctgacggaaccctttcacctcttccatccatgcgacgtgtcgcccatccggtgaaaaaacgacggcgtccgcagacggcgggttgtcgtgcctggcggttaagaagtcgatcttcccactttgtgcgtcgcagcaggcaatccgattttccagcaccagtcccagccatttacccgacggatgccagttaaacgctgactgtacgccggtcgcatgatgcgttaactgccggggctcgcctccctgcggcgatatcagccacagttgcgctacgccgttatcgtcccgcatcaaaaaggcgatcgccgtcgcctgcggattactgcgaacccagtggcgtggttcgttagtgagtcctggataaacacgctggtgagtaaaggtaagacgccgctgaactacgcccaacggcggcgatggcatcgttgattcggttcccgtcagcggcgtgtcgcctgcctgtttccagccgttttcatgacacggtaaatcgacaataaacagctccgggacttttttgcccgtcagcgacagcgtatcgccaataaaggcgatctggcggttgcccacccagccctcttcataggcgcggttaatgtcatcgctgccaggtctcggcgcaggcgtcgtgcggctaaccagtacgcaccagtagctaccgctgtattcgcgcggatgctgaaccggcaccgttaccggcccatacggcgcggccacgccgacattacgcagatccagcgccggatcgcgctcatgcagaacgtggtcattataggtaaaactcaccagctcgccgttcgggctaaacacatggacgtgactgccgccgcgcagcgcgccgggagtatacggcgcagtaatatccatcgcatcgaggttagtcacaccctccgacgttgcaataacgccccggcggtggtgaaaatcgtaatgccacgtctcatcagggttttcagggccatgaataaacacatagtggttgtcggcaggatgcaccgtcaccacgccgacatgcgcgccctgcacggcgcgataaatcacctccacgtcgccggtatgcacattgacacgctcaatagtcttgcccgtaaatgacgcgcctgaaggccgcacatcaaagaccagccactggctgtcaggtgtccaggtattggtgttggtaagctggtgatggcgcggcgtaaaggtgatttgtttcatgggatgtcctgataagagacgatgctcgtcatcatactgcacacgggcttcactttcaggctttagcgtatcgttgggatagccaggcccgatggcgccgcgccaccgggccgtcagggtcttatttctcctgcgccagccggatactgcgctctatcaccgcccgccgggtatcgtctgccggcaacagtttcagcatcatctcccaggccgccaccgcctcgccaaagcgccgctgctcaaaggcgttaaacgcatacaggcttaacacccggatatccgtgtggtcgcggctcaccagctgacgcagcagctccccgccgcggcggttatcctccgggtcggacgagcgcgtcagcgcctccgcgtagcccagcgccgcatcgctgtttttcggggccagacggtaggcgttcgcatacgccccggtggcggtaccggcattacccagtaccataccggtgcgccccagcatgagccagccctcaacattgccggcatcattctgcaggcgggtgcgcagccccagcgccagccgcgccatctcctcttcattcagcggctgcgccgccgggtccagcgcccgcgccagcagcccgggcgtctgcgccgttgcctgctgccaggccctgacctgctgatagctgccggtcagggcgtagctgccggcgccgaccgccagcgcaatgacggcccccggcacgtaaacgccccacccggcgcgcgcgccgcaaaccggggtgtccgccggcagcggctcccggcgcaggcgcacccgccggcgcgtgcgggcaacgattatccacccgcccgctacgatggcggccagcggcagcacccacagcagcaccgtcaacggggtcagcggcgggtcgtaggtgacgaagttgccgtagcgcgccaccatgtaatcgatgatttcctggcggctcttcccctcctgcatcaggtcatacaccctgcggcgcatgtcggtggctatcatcgcgttcgagtccgcaatgctgttgttctggcatttcgggcagcgcagctgctccgtgagctggcggaactgctgctcctgcgcttcatctttaaacggcatcacgtcggtggtcgcccgcgctgacccggagataaccagcaccagcatcagcatcaccatgcccggtaacagtctcattgcgccgcctcccggctgtatctgtcccacagcggtttcagttcactctcccacacccgggcattcaaatcgcccgcatggcggtagcggataatccccctgccgtcgatgaggaaggtttccggcgcgccgtacacgcccaggtccagccccagcatcccgtcgctgtccgataaactcagcgcatacgggttgcccagttcctttaaccaggccaccgccttcgcccggtcgtccttatagttcagcccgaccacccggataccctgcgcagaaagctggttcaggtactgatgctcggcgcggcaggtcgggcaccaggtggcccagacgttaagcagcaccggtttcccctgcgtcagcacctccgcctcatagtactgacccggcgtctccagcgattccaggcggaacgccggcaccggcttcccggtcagcgccgattcgagattcgtcgggtcatccccctgcgcgttgcgcgtcagctgccacagcagcgccgcggcaatcagcagaaaaatcagtaacggtaataacagtacgttgcgtttcatccggcctccggcaatggtttacggcggcggtagcgcgggtccaccaggcacagcagcccgcccagcgccatcagcagccccccggcccatatccagcggacaaacggtttgtagtacaggcgcacggcccacgcgccgttgtccagctcctccccgagcgcggcgtacaggtcgcgggtcagcccgccgtcaatcgccgcctcggtcatcaccatccggctggtgttgtagagccgtttctccgcgtgcagcaccgcctccggctcgccgtggcgcgtcaccccgatgagggccaccccgccgcggtagttgggcccggtgatgtcccgcacctcccggaaggtgaagcggtagtcgtgaatggtcacgctgtcgcccgcccgcatccgcacgtcacgctccacgctgtaattctggctgaaggcgatgccggtaatcgtcaccgccagcccgaggtgcgccgccaccattccccagtagctgagagaggttttcgtgccgcgggacacgcgctgtacggcttcggccaccgccagcaccgcaatccagcaggccatcgccatccccaccgccgtcatggcgatgattttatcttccagcagccacggcaaaagtaccgacagcaccagggtagtgacaacggcagcccacagcagtttcctgatgttacgtggccggtcccggccccagcgcaccagcggccccacccccagcagcagggcaaaggggaccatcagccaggtgaacatggtgttaaagaacggctcccccaccgaaatgctgcccagccccagctgtttgtgcaccagcggcagcagggtacccagcagcaccaccagcatggcggccatcagcaggacgttgttgccgagcagcagcgactcgcgcgaccacagcgcgttgttcacccgcgaacgcaccctgtgcccgcgcacggcgaacagcagcagcgagccgccggtgaccagcaccataaaggcgaggataaacattccgcgcgccgggtcggaggcgaaggcgtgcaccgacaccagcaccccggagcgcaccaggaaggtgcccagcaggcacagcgagaaggcgcagatggacagcagcagcgtccacgccttaaagccggcgcgctgttcggtgaccgccagcgagtgcagcagggcggtgcccgccagccacggcataaaggaggcgttctccaccgggtcccagaaccaccagccgccccagcccagctcgtagtaggcccacgccgagccgagcacgatgcccagcgtcaggaacacccacgccgccagcgtccacgggcgggcaaaacgggtgaacgcgctgtccagacgcccgctcagcagcgcggcgatggcgaaggcgaaggccaccgagaagccgacatagcccatgtacagcagcggcgggtggaaaatcagccccgggtcctgcagcagcgggttcaggtcgcgcccctccaccggaaaggccggcagcgtgcgggcgaacgggccggaggtgaacaggatgaacgccagaaaaccggcgcagaccatccccatcaccgccagcacccgggcgacgatatccgccggcaccggccggctgaacaccgccaccgccagggtccagccgctcatcagcagcacccacagcagcagcgagccctcgtgcgccccccaggtggcggccacccggtaccacaccggcagctgcgtgttcgagttgccggcgacataggccacggtgaagtcgttaaccacaaaggcgtgcaccagcacgaaaaacgcgcccgccacgcagatgaacagcagccaggcgaacaccccggccgacgccatcatccgcgcgtcgccgcgcgccacgccccacagcgggtaaacggacagcagcagcgccacgccgagcgccaggcacagcagcgcgtggccgtattcaggcatcatgatgaggtgtccttatcagcgcgttgcgggcggcggtggttttcctgcatcgccttttccacttccggcggggtgtagttctcgtcatgcttggccagcacctcctgcgccaggacgtggctgcccttctccagggtgccctgcaccaccaccccctgtccctcgcggaacaggtccggcagtatcccctcatagctcaccgtcaccgacccttcggcgtcgtagaggctgaagttcaccttcagcgagtccgggtcgcgcctgacgctgccgggcatcaccatcccgccgacgcgcaggcgctggcccaccgccggcagctgctgcgtctcgcgcttgccgtagaggatttcgccgggggtatagaacaggtcgatattcgcgcgcagcgcgtacaggaccagggcggtggtcagcgccaggcccgccagcaccgcgcagaccacccatagccggtttttacgtcgcaggttcacgcggcctcctgttgcgcctgtgcggcacgcatccgcgcctcgcgcgcccgctgctgcgccacgccgcgcagaatggcccggcgctgcagcaccgtgtgcagcgccagcagcaccagcggcgccacggtcatcgccaccgccagccagacaaaaaaggcgtacccgcccatggcgaaaaaatcgctccacgatgaaaatgccggactcaccggtgcccccttttcagtatcagttcgctcacccacgggcggcgtttttccatcagtaaaatcaggttgcgcatccgcatcagcgccagcgtcataaagagcagcaggaagccggcgatggcccagcgcagcggcgagcgcatcgccgggtcgatactctgctgcatccgcgtcgagccctggtgcagggtgttccaccactcgacggaatagtggataaccggcaggttcaccacgccgaccagcaccagaatgcccgccgcgcgcccggccattttacggtcgtcaaaggcgtgccacagggcgatgaccccggcgtagagaaacagcagcaccagctccgaggtcaggcgcgcgtcccacacccaccaggtgccccacatcggtttgccccacgccgcgccggtgaccagcgcgatgaaggtgtacaccgcccccaccggcgccatcgccgcgacggcaaggctggccattttcatctgccagaccagcccggtgaacgccgccaccgccatcgccgcatagatacccatcgaccagatggccgccgggacatgcaggtacataatgcggtagctctccccctgctggtagtccgccggggcgaaaccaaagccccggacccagccggtggccagcgcgatgatgccggctgccgccagccacggcacgagcctgccgcaaatctgatacagccggggcggcgccgccagctgatgaagggttttccacatcgttgtcacctgacctcctgaaaccagtaaaatgtccgtcgcgccggggcgctactgcacgctgaggcgcagcgccgccgcggtggcgaacgggcttaacgtcgcgctgcccgccagcagcgcccccagcaccgccagatagccgtcaacgggtaaatgcatcgatgccgcgtccatcgccgcggtggcgaaaatcagcaccgggacactcagcggcagcaccagaatgcccagcaggacgccgccgcgccgcaggccggccgtcagcgcgacgcccggcgcggcgagaaaccccagcgccggcgtgccgagcagcagcgtcagcgccatgattttccagccgtacacgtccatccccagcagcagcgccaccagcggggagagcatcatcagcggcaggccggtcaccgcccagtgggccagcaccttcgccagcaccaccgccggcagcggcaccggcagcagcatcagctgctccaggctgccgtcctgcaggtcgtcgcgaaacagccgctccagcgccagcagcgaggccagcagcgccgccacctggatgatgcccggcgcgatacgcgccagcagctgcggctgcggcccgacgcttaacggaaacagggtgatgaccatcaggaagaaccacagcgggccggcgatgtccgcgccgtggcggaacgccacgcgcagctcgagacagaagacacgccacatcacagcccggcccccccgccggtcagcgccaggcggcggacggtgtccgcggcccccggcagcggctggtgggtggtgagaatgaccatcccgccctgcgccgtgtgcgccgccatccgccgggtgaggcgcgccacgccgttaacgtcaatggcggtgaacggctcgtcgagcacccacagcgcggcgcgggtcagccacaggcgggccagcgccacccggcgctgctgcccggccgagagctgagcgaccggcacgtcctcaaatcccgccagcccggcctgcgccagcgcctccgggagacgcgcgccgtcgccggggtggaaaaagtgcaggttctcccgcgccgtcaggcgggatttaatccccggctggtgccctatccacagcaggctgcgatggaagctgtcgcgcacgcggcgcaggggctcgccctgccagtacacctccccgccgtccgggcgcgccagcccggtcagcaggcgcagcagggtggtttttccggcgccgttgccgccggtgacctgcacccactccccggcctccacggtgaacgacagcccgcgaaacagcgtcctctcgtcccgctcgcagtacagatctctggcttcaagcatcattgtcattgcgcatattcaggttgatatggcgtataaacaccggtcaggctttccaggaaggcgacgatatcgtcaatatcgttttgcggcagatcggtgccaacctgataacgcagcatcagttttaccgcgccatccagcgtcggtacgtcgccccgatggaaataaggcgctgttaacgcgacgttgcgtaagcccgggactttttgccgtaatttatcgcgaacctctttggtgacgttcatacgaccaatatccgctgcggtaatttcgccaaaattaaagtctcgctttaatcccaatggttcaaaagagcgcccgcctaaaatgataccgccgtgacaggttgcacatttattctctttaaataattgataaccgtgtttctgttgcgcggtcagcgcattttcatctccacgtagccatttatcaaaggcggaatccggcgttatcaacgttttttcaaattcggcgatcgcatcagtaatattttccccggtaaatccttgcggataaaccgcctggaaatcttttttcagggcaggatctttatcaagcttgctaataatttcatcccaggatttagaggccatttcaataggatttaacggtggtccgcctgcttgctcctgcagggttgcagcacgaccatcccaaaattgttcgatattaaatacggagttgaataccgtcggcgcatttattggtcctaccgcgccgccaacgccaattgaggtttttctgccatcgacaccgcccgcatttaacgcgtgacaatgcgcacaggatattgtgctgtcgccggataaacgttcatcatgataaagacggaaacctaagtcgacttttttcgcatcgacgggaatattgcgcggaataggctgaacgggttcattccggtgcgcggggtcggtatcggcgctggcatagttgcgctcacgctgatcggctatccagttcaggatgtcagtacgctctttatcgctgacgccccccgcccagtgcagcgcgacatagcgggttggcggcatagtctgatgttgcataacccattcaattttattcagttcgctttgcggcaccggcgtatccgcaatcagggcggcccgtaccgcctccaggttaaacgacttgtaaccgagctggatatcgtaatccattaactgctttgccaccggaaaagaggaataaaaaggcaattcagcggaaggcgtatgacaataatcacatcctttctccctgaaataacccagtattttattattttcacccacaaccgaggcctgcacatcgctttttttactgcgctgtttgtcgtaataccatacatacccggacaaacctaaataacataacagcccaacggtgataaccgttgtcgcatagagggtaatttttttcatatcactatccttatggggtattgcggcatgattaattaaattttatttttttactcatgaggcccgtcaatactaaatacaaacccatcatggatattgattggtatcaataattacaattggctaaacctatagatatgataacccccgactatcgtaagatttattttgcgatgcccgtcacagggtttattcaaccgcaacaatggataaatcctcttttccgtcatcaaaacgaacgatagccaacaataattgacttaacgcagcataaaaaccatagggatcatgcttaaggcaattatttgtaaattccggaagccactccagtaatgacgacaatgttttctggcgtaatttattcattctccgttgttggaacgattcacccaatgaaaaatgtaaatggctgagtaattccagataaatcgccaggtggtcggccggctctttaaaatcgtcgttgacttccatcccggcttcaagcaataaatgtttaatcatgccgggttcctgctgcgggtattgcgaggcgtagggcaaggccgattttttatccgtcatcaggaacaatccgcaaaaatccgctgccagctccagctgcgcatcctgacgcaggctaagcgcggcaattttttgttcgagtaacgccaccgacgccgccagcgctggctgacgctttaacagcgccagccagtccgcgatttccgcggactgtaattgtattaacccttcatcatccacttcccggaaaaagagtaacgccagccatgcatatacgcaggcgtactgttcctgagcaagcgctggctgcttaatcatgcggattcccctgcgatgcgggtacatattcacactgcgcgaccatctcgaccggaccgttaaacgctgtgacgttatccatagggccggtatatttttcaatttccaccagcgtcgtatgcgcgctggtcgcctgcgcgagctgtgatgtaccgatatccagcgttaatacgttagggttgccgtacttacataacgcgttgagatcgccgcctttatcaggatcgtaccaggcgccttcatgaattcgcgccacgcccggcgcatagcgatcggaaactaccgctcccgccagtacctgcccgcgtgcattgaatacccgcacgatgtcaccgttgcggatcccgcgcgcgctggcatcctgtgggttaataaagaccggctccttgccgccaacggcatattgctgacgcagcgtttccgactcgcacagttgggaatgcagacggaaatcagggtggacggactgtaagtgcagcggccagcgctgcgatcccggcccgccatgcgagcgttcgattttttcgaaccacatgggatggccctgacaatcgtcgtattgcatgtcggcgatcgttttggagtaaatctcgatcaaaccgcttggcgtgcccaacggctccaggtccggatcttcacggaaagcctgatggcgcacaaacatctgcggatgatcaaactcgatgtactcctgttgattccagaacacctcgaaagtcggtaagtggataccgcgaccttttccctgctggctcccttcctgccagatgcgtttcagccagcccatttcatcaagaccttccgtgaatgccgcttcacggttaaagcgtcggcagagatcgcggaaaatatcaaagtcgttacgcgcttcaaactgcggcgacaccacctgtttcatggcgataatgccgcggttagagtggttgccgaactgatcgaggtcgttacgctcaaattgggtggtagccggcaaaacgatatccgcaaagcggcaggtcgacgtccactggttatcaatagcgatgaccgtttccagcttgcgccagccttcaattatgcggttaatttgttggtgtcggtggaacgggttggttccggcgaacacgcacatcttcagcggcggtaatttaaccgatttgccgttccagttaatgtccttgcccggttcaaggatggcatccataaaacgcgcaataggaatggtgctgctgtagcctttgtaatccgtgctgtcgtgcactggcggaacggtcgtcgaaccggaaaagccgcttaaaatgatccctttacggccaggcgtcccggcgccgttgtagtgccagccaaaaccaaagccgccgcccggtaaaccaatctgtcccagcattgccgccagcacgacgaccatccatgaccactgttcgccatgctgcatacgttgtacgcaccagccagcgatgatttgcgttctgtcgcccgccatctgccgcgccaacgcgcggatggtgtcggcgtcaataccgcacagtttttccgcccaggcggcatctttgggctgtccatctttctcgcccagcaaataggggaggaactggtcaaaaccgacgcagtagttatcgaggaaatttttatcgtacagtttctcgctgtacagggtatgcgccagcgccagttgtaacgggacatccgtctgcgggttaatggcgatatgtttgaccttatcgcgccccagataatcgtgcgtggaggtgacgaccgggtcgatgctgatgaccgagatagcgccgctggcaaccttctcttttaattgttcatagtactgatagacatcgtgatccgggcaccaccagtttgcctgctggtttttcaccatatcagaaccccatagcacaatcgttttactgttctgtaaaaccagaggccatgacgtttgctgctcgtacacttccattgaacccaccacgcgcggcaaaatcacctgcgccgcgccggtcgaatagtcccctcccgtgctgacgctattgccatgtagcgcaatcgcgcgcgccagcatcccggaggcgttatggaacatgccggtagattgccagccgctcgccgtcagtaacgcgctcggcccgtaggttttttgcacccgctccagttcctgatagaacagatccagcgcttcatcccaggagacgcgcacaaaacgattatcgccgcgctgcgaggtgtcgctttgatgacctttgcgcatccagtcgacgcgcaccatcggatagcgaatacgcgccgcgttgtggacgtgatcgggcaggccggcgatcattttggacgggtatttatcctgttcaaacggttttgccgccacaaatcgaccgtcaaccaccgtggcgcgaatcgccccccagtgagagccggtaaggataccctctttcgtcgcggcgcctggcgcaacggcatccgccgcgtgggcgctacggggcgtcagcagtgacggccccagcattcctgccaccgtcaaaccgccaagctgcgccagaaaacgtcgacgagagacgtgtaacgggtccttatttttcattgtgttctcccttatcgctgtgcggcgtgttggtggtatcagacgcattcatctggagatatttcaacaaggtacgttcttcacgcttatccagactggtgaaaccgatcatgccgttgagcgtgccgatccagccgttagcgtcaaagtgcgctttgtccggcgcgccgtgacactgattacaggtgccgttatagagggagtcggcataggcccaaatcggtttaatgtcatttaccatgtcgcctttttgcatccacgcggttgcctgtaatttgctccactgagtattagtcgccgcgacagtggtctcttccagcgttttcacatgctgttgcacatcgccgcgaatcgaggcgacaaaaatacgtttaccgggcagctgcgtcagcacgcgctggcgaccgtccgtctccgtccagccttcgatttgcacttgcagccagtcaccgtcccgtttaaggactttcacttcagaagcaggtaacagcgaacctgccggttctttatcgcctttagcggcgtaaatcggcttgatatccagcgaatagagcgtatcgccgtcattatgcgtactggcgctggcgcgcagttcatcaaactgtttgcgaaaaccgctgctcatatccggtagctggtgggcaatccctttatggcagtcgatgcaggattgattttctttcgcggcgattttcatttgccgcgccgcttccgggttctgtttcgcgtgatccatcgcatcgtagttatggcaggaacgacaggtcgcggagttattctctttcatgcgcgcccattcacgctcggcaagctcggcgcgtttggcttcaaatttttccggggtatcaatcgagtgggcgataaatgtctggtaaagatcgttgctggcttccagcttacgtttcaccatgcctggaatatcaggggggatatggcaatcgtggcattccgcgcgtacgccggaagcgttctggaaatgtacggactgtttatattcctgatacaccggctgcatactatggcagctgacgcaaaactctgtcgtactggtcagtttgataccgacgtgaggtaacacgatcagcgcaacgccgatcacaatcccgacaatgaccagcgccagtatcgaccaacgggcgcttggcctgagtagcgctctccagagttttcgcataatagcccctgtaattatatggtttaatgcgcagatcttattccgcaaatatgaacagcgtcactggtcaggatgaacgggatacggcaatatatgaacagatatgaacagaaagagaccgcgcgcaggatgtcacatcacattgttattgttgaggatgaacctgttactcaggccagattacaggcctattttgagcaggagggatatcgcgtttcagtgaccgacagcggcgcgggcctgcgcgacatcatggagcatgagcacgtttcgctgatcctgctggatatcaacctccccgacgaaaacgggttgatgctgaccagggcgctacgcgaacgctccacggtgggcattattctggtgacggggcgttgcgaccaaatcgaccgcatcgtcgggctggagatgggcgcggacgactacgtcaccaagccgctggaactgcgcgagctggtagtgcgggtaaaaaatcttttgtggcgtatcgatctggcccgccccacgccgcaaaatgccagtgaaaactgctatatgttttccggctactgcctgaacgtgatgaatcacacgctggagcacaacggtgaagccattaagcttacgcgcgcagagtacgagctgctgctggcctttgtgaccaacccaggcaaagtgctgcatcgcgaacgtctgctgcgaatgctttccgcccgccgcgtagagaccccggatctccgcacgattgatgtcctggttcgccgcttacgccataaaattacgccggaactgctggtcacacagcatggcgaaggctactttttagcctcggaggtgtattgatacaaatagacgggccgaaatcccggaggcgatagcgaacggcgaacgcgcgcgctgtcggcgttgttatgcgtcaaaataagcaccggcgggctgatattttcaggcaccggttgcccctgtaagaccttaatcgactgcgttatcgctaattctccctgccaggccatctgatcgctgagcgccatcaggatatggccgcgttttaaaccgcgataaacctgatgcgtcagataaaatgagacgatcgtgagcggagtcgtcaaatttcgcccttcgcccatcgccgcctccgccgctatcgccgacccggcgaccacattggcgtccggatgacgctccagcatttcctggagtaagtttcgctgcacttcaatgtcgttatcgccccaggcgatatccacaatgttgatggcgctgcctttaattgcctgacgaaaacccgccaccatctcctgactgccgccagcttcctccggccccgggaagagtaaaacgttaagcgtttttcctttgctccactgcaccaggaaacgtcccggcagataacccatctgaaaccacggcagaccgacgtgagttgccacgctggcgtcgcgtatcacgttcgccacttcaataaccggcacattaccggcataccgttccagttccgggaaacgaatggtactgctgccaagcagaatagcgtcggcgccccactcccggcactgcgtcatttgctgttgttgcgtcgccagttgccgatagccattcgcttccagcacttttaaatcaacgccatacaatttggccgctttttgcatcccgtagttgacggacaaccagtaagaatctttcaggctggggtataatgcgcacagtttccagggtttactcgcattgactgacgtttgccgccagggaatcgcccgatcggcgcgcgtccagtgtagcagtccggtttcggctgacgccgtttctacattcgagacgatgattatcaaaaaaaagaacgaaataagcgcgcgcatgatagccccaccagcaataaggttttatcctaatggtttttccggcggcaactcaacccatttcacccgcagcgcataaatgtcaacgccttcactgacccgcagattatggctggccttcgccctgatggcggcactcaccctgctcagcaccgtgatcggctggataagcctgcgcgtcattagtcaggtggagcaaaccaatacgcaagcgctgctccccacgatgaatatggccaggcagttaagcgaagccagcgcttacgagctcttctccgcgcaaaatctgaccaatgccgacagtgagggcgtttggctggcgcaggggaagatgctgaaagcgcaaagccttaaaattaaccatcttttgcaggcattaagcgagcaggggtttaatacctcggccatcgcccggcaagaaaaagagattgcgcaaacgcttgggcaacagggaacgctggtcggtgaaattctcacgctgcgcgcacagcaacagcagttaagccgccagattgcggaggcggcggaaagcattgccgcccaggctcacggtcaggccaataatgcagcgacatctgcgggcgccacccaagccggtatttacgatcttatcgaaagcggtaaaggggaccaggctgaacgcgcgcttgaccgattgattgatatcgaccttgagtatgtgaatcagatgaatgagttgcgggtcaatgccctgcggtttaagctgctcattgtgaccttaaaagacgcgcaagggctgagcgatgccgaggacaccgatgaaaaacttaatcagttggttaaaattttatcccgccgccagcagcgtatagaagatcctaccgttcgcgcccaaatcgccgacgcgctggagaaaataaatcagtacaccacactggttaccctgtttcgtaaggaaaacgctatccgcgaccagcttcaaacgcttatggccaataacctctttcagtttacccgcttcagtacggaagtgtcgcagttggtgaacgccatcgaaaaacgaaacgaggctgggttagcgcgtcttacacacgccagtcagcgtgggcaaatagggttagtgatcttaggtatcctggcgctgtgctcattaagttttattctttggcgagtggtttaccgttccgtatcccgcccgctggcgcaacaaacgcaggccttacagcggctactggagggcgatattgactcaccgtttccggaggcggctggcgtcagcgaactggataccatcagccgtctgatggaagcgtttcgcgccaacgtgcgcaaattgaaccgccatcgtgaggatttggcggaacaggtgcgttcgcaaacggcggagcttcatgcgctggtgctggaacaccggcaggcgcgcgccgaagcggaaaaggccaacgaggcgaaatcgacgttccttgccgccatgagccatgaaattcgcacgccgctttacggcattctcggtacggtacaattgctggccgataaaccgctcatggcaaactaccgcgacgacttacaggccattaatgattcaggcgaatcgctactggcgattcttaacgatattcttgattactcggcgattgaagtaggcggcaccaacgtttctattagcgaggagccgtttgaaccgcgacaattgttgaatagcgcgctgcatttaatgcacagccgcgtgcaggtggcgctcatcgccgactttagcgagcaactcccctccacgctacaaggcgatccgcgccggatacgtcaaattgtgattaatcttttaagtaatgcggcgaaatttaccgatcgcggcagcatagtgctgcgcacgttttgcgacgatcagagctggtttattgaggttgaagataccggatgcggtatccctgaagcgaagctgacggctattttcaaaccgtttgtgcaggcgacaggacgccggggcgggacgggcctggggctggctatcagcgccagcctggcagaggcgatgggcgggacgctaaccgtcaccagtacgcttcatgttggcagttgttttcgtttacaactgccggttcgccaccccaaacccgcaagcaaaagtgcgttcaggaaaccgataaatcttaacggattacgcctgttgctgattgaagataatatgctgacgcagcgtattaccgctgaaatgctcacgggtaaaggggtgaaggtctcagtagctgaaagcgcgaatgacgcgctacgctgtttagccgaaggcgagtcctttgatgtggcgctggtggattttgatttaccggattatgacggcttaaccctggcgcagcagttgatgagtcagtatcccgccatgaaacgcattggttttagcgcgcatgtgatagacgataatcttcgtcagcgtaccgccggtcttttctgcgggattattcaaaagcccgttccccgcgaggagctttaccgcatgatagctcactatttacagggcaaatctcacaacgcgcgggcgatgctgaatgaacatcagcttgccggcgatatggcgtctgtcggcccggaaaaactccggcaatggatcgcgttattcaaagacagcgcgctgcctttagtcgaggagatcgaggcggcgcgcgccatgaatgacgacgttaacattaagcggctggcgcataaattaaaaagcggctgcgccagcctggggatgacgcaggcaaccgaagcctgtcgggagctggaattgcaaccgctaagcgatatagatattaaaactatcgtgacgcagggggtgacggcgctcgacgcatggatagccgatcatccttcgccataatagcttccggctcgccacggccaacttatccgacgcgtttcacatcgcccactaacaggatgtaagacagcgcgcccagcagggccacaacggagatatagaccagcgccggagcaaaaccgtagctttgcgccagataaccaatcactaacggtacgctaatcccgcccaacccgccgataaagttaaacataccgccggtaaggccaatcaaccgcatcggcgcaagcgaagagattaacgaccaggtaatggacgcaaatccgttgccgaagaaagctatcgccatcaacgccataatccacaacggatcgttagtgtagttagcgcccataatgcacgtggagatgagcaaaccgcaaataatcggcgttttgcgcgccacgcccagcgagaagccttttttcaccagtttatccgccagccagccggagagtagtacgccaaaaaaggcagccaggaacggtacggtcgtcataaagcccgcttttagcgcggtaatgcctttttcctgggtcagataattagggaaccaggtcagaaagaaccatagcgtagagtttacggcgaactgaccgaggtagacgcccaccagcttacgatggaacaccagtttccagtcggctttcgtcaacggctggcgggcctcttttttcgctggcgcatcgccatccaccagaccgccgccatcgcgaatatactccagctccgcctggctaaggcttttcgtcaaacgcggcggttgataaaccttaaaccagaccaatgaccagataatcccgataccgccggtgacgataaagacccagtgccagctcagcatttcctgaatccagatcagcagcggcgtaaggaatgccagtccgacgaactgtccggaggtgtagaacccgactgcggatgcgcgctcatgctccggaaaccagctagtgaccatccggttatttgccggaaaggctggtgcctcgaaaatcccggtaatagcgcgcaggccgataagcgacaatagtcccgtcgcaaacccctgcaatagcgtcgcgactgaccagccgaagatagcgataaaataggtcagccgggacccaatacggtcgagaaaccagccgccagggatctggcataacgtatagagccaggcaaaagcggagaagacatagcccatttccgctttggtaatgccgaattctttttgaatatgcatggaagccacggcaaggttggcgcgatcgacgtagcaaatcaccacggtaataaagatcatcaccagcgtcagatagcggcgacgccccggctgtgctgctgtaactgaaatatccatcgtcatctgtctccagattctgggcatagcgaggccgctcaccatgccctgtaaattacagagggtgtgtttttatatttaaattgggttgcccggagggcgacgtttgttgagcctacagcgtggcgatcaccactcggctaccgatccgtcagcgtgccgccacaacggattacgccagtccggcgcgcttttgctaagttcaatcaccctggcctcgtcaatgtctacgccaagacccggtttggttaagggtttaaagaagccgccgtccatgctgaagtcttctttgtttttcacaaagtcgagcagctccgcgcccttgttatagtgaatgcccatgctctgctcctggaataccgcgttgcgcgaaacaaaatcgatatgcaggcaggcagccagggcgattggacccagcgggcaatgcggcgccagcgccacatcatatgcttccgccattccggcgattttatagcattcggtaatgccgcccgcgtgggataaatccggctgtagaatcgccaacccgcccgcgtccagcacgcgtttaaattcaaaacgcgagaacatacgttcgcctgcggcaatcggaatatgcgtttgcgctgccaggcgcggataatattccgcctgttccgccagcaccggctcttcaataaacagcgggcgatagggttccagttctttaatcagcaccttcgccatcggcgcgctaacgcgaccgtggaagtcgagcccaaactcaatttcactgccgaaagcttcgcggatttgcgccacggtattgaccgccgcatccaccgcacgggagttatcaatcacgcccatctcttcacagccgttcagcttgaaggtgtcaaaaccaataccgcgcaatttttcaataccgtcaatgacgtctgccggacgatcgccacccacccagctataggccttgattttgtcgcgcactaggccgcccatgagctgccagaccggcgcattcaacaccttgcctttgatatcccacaatgcctggtcaataccggcgatggcgctcatcataatcgggccgccgcgataaaaaccggcccggtacattacctgccataggtcgttgatacgcgccggatctttccctatcaggtagtcggcaaactcatgtactgccgcctctacagtacgtgcccgaccttcaatgaccggctctccccagccaaccacgccttcatccgtttcgattttcaggaacatccaacgtggaggtaaacggtacgtggtgatgtgagttattttcatttcactgcctctcgatacgcattaacaaatgccgcagcctgctgcgcggtgcgttcaacggattgcccggcgcgatagagatcgctacccaatcccgcgcccacacagccggctttaatccattgcgccaggttttccggcgtcacgccgccgacggcaaatagcggaacatccggcggaagtaccgctttcagcgcgctgatgtagcccggaccaaacgccgacgacgggaaaatttttaacgcctgtgcgcctgcatccagcgcagaaaaggcttccgttgccgtggcgcagcccggacacacggtcatgccatagctcaccgcccggcggatcacctccggttggatattcggcgtgacgatcagcttgcagcccatcccggcaagctggtctacctgttccggtttcagtacggtaccagcgccaataagcgccctgccgccatacgccttcaccacgaaagaaatgcttttttcccactgtggggagttaagcggaatttctatagcgtcaaatcccgcatccaccaccgcgccaacgtgcgccagggcatcatcgggcgtaataccgcgtaagatagcgatgagagggagattagtttgccactgcatgagcgatgctccttattccagcctgaaatgccatatcgccatccacggttgaaacatcacgcccaatagcactaaacgcctgttggtaacgtgagatcagcgcgggtccagcgacgagagtgatagcctgttgcgccgcgaaggattcgctcatgctggcgacttccgcgccaatcaacaggccggagaggaagtcgctgacctgctcacgcgcaaggtgtcccaacacgtgcgaggcgcgaacctcaaaaagagaaggcaggacggcaggagaattaagaccgcgctccagccccgcggcataggcgtcgccagaaacttcctgttccggcaaaccagccccgaccagcgagtgacgcagcaacaagtgatggagttcgcctgtcatcacagtacgaaaatcatgaatttgttgcgtatcagtctgtacccatttgcaatgcgtgccgggcatgacatagacagaagaaggagaaagttcgcgggcgccaagcagttgcgtctcttcaccgcgcatcacgttgtggttatcctcgcgtgagacacacaatccgggaatgatccagatgttgtcgccaacggcggttaactgttcgccaatagcggagaacagggcgggaaccggcagataaggcgcattttgccagcctacgttactgccgatcatgcccgccattaccactggggtggcgctgtcgcgccagtgtgttgtgacttctgctaacaccgcgtcaggagatttaccgttcaggcgtgtaacgcctgcttctgattgcctgctctccaggcatttgtcgccctggtaaagccaggcgcgcagattggtcgatccccagtcaattgcgatgtagcgagctgtcatgtgatttcctttaaccttcgtgtcgagctggcgatcatggttaatgccgcctgctctgccgcatcgccatcctgatgccgtatcgcatcgaatagcgccttatgttcctggagcgttttcggcatattggccgcatcgcccatccaggtccgttcaaataccgctcgctgtagcgagctgatcgctacatttaactgttgcagtaccgggttatgcaccgactgcaacactgcttcgtgatagcgaatatccgcctcgttaaacgcttcccggtcctggttgttggcaatcatgtcgtttagcgccgactcaatttcagccagatcgcttgatgttgcccgttccgccgcccagcgtgctattgctggctccaccaggtttcgtatttcgctcatcgcgctgataagcctcgggtcgtagtcattttccagcacccattgcagcacgtcggtatcgagataattccactggttacgcggtgcgataaacgcgccgcgatagcgcttcatttcaattagccgcttcgccataagcgaacgaaacacttcgcgaatgatgttgcgcgacgtttcaaactcctcgcacagatccgcttccgctggcagcgccgaaccgggtacgtatttaccgctgacaatctgtttgcccagcgtgataacgatgcgatcggttttattgagagtcatagagagtccttgtgctcgatgtgaactctcttactttaccgcgatagctgaattacgccgcaattttgtagtactagcgtgatatcaaccgtcgttatcatgccattaatgtagtacaacataattatgttgtactacaatttagatcacaaaaacaacaattggttatgggaacgttataagacgtaaacgaaagacataaaaaaacccgcagcaagtgcgggtcgttaagcgcgtatttgcccgatggcggctatgccttatcgggcggggaaatggccggatgagtgatcggggttcagcacaaatttttcaatcgcccaggcaacaccatcttcaaggttcgatttagtcacaaagttagccacctctttgaccgacggaatggcgttgtccattgccacgcccataccggcgtattcgatcatcgcaatgtcgttttcctgatcgccaatcgccatcacctcctctggcttaatacccagcgcctcggccagtgattttacgccggtgcctttattaacccgtttatcgaggatttcaaggaagtacggcgcgcttttcagcacggtgtacttttccttcacctctgccggtatacgcgcaatcgcccggtcgagaacggcaggctcatcgatcatcataactttcaggaactgggtgttcgggtccatcttctccgcttcacaaaataccagcggaatggtcgccacatacgactcatgcaccgtgtagtagctgatatcgcggttagcggtataaagcgtatttcggtctaatgcgtggaagtgagaacccacctcacgggacagtttttccaggtaacggtagtcatcatagctgagcgccgtttgcgcaaccgtactgccgtcccctgctttctgcaccagcgccccgttataggtgatgcaataatcgccgggctgttccatgtgaagttctttcaggtaactgtgcacacccgcatacggacggcctgtggtcagcaccacatttacccctttttcacgcgcagcggcaatcgcgtttttaaccgccggagaaatggtgtgatcgggcagcagaagggtgccatccatgtcgatagcaataagtttgatagccatgaaatccccgcattaaatgagtcctgactcatgctaacgcgattccgctcaaaaaacagcaaagaatccgagagaaagggggataagattcacaaacgggattccccttttcaggccgtattctccctcctgatgtattagataacctcattaatcaaacagaaaataccgtttttctaaaagaatgtgtattgctactttggacatcatcacttagagcctaatgggattggttcttaatcagtaaaaatcaacaaaaacttatattttaaaataaccttatccgatgagaaggagatcgctaatgtcgatggcccttaccgcccccccaaccaggaaaagatttttaatcgttgcctgtctgtttattggaatatttattgcttatctcgatcgcgttaatgtttcggtattagccgcgaatgaacccttcttagcctatatgggtattgaaggtatgccattgcaaatcggcatgatgatgaccgtctttctggccgcttatggtatcgctaacgttgtattatcaccgcttggtgattatctcggccccagaaaagcaatgatgctttgtattctgatctggactatcgctttaatgattggcggagtcgctacatcattcgctctaattattatttgccgtatattactgggcatcggagagggattttattatccactgcaaagcgtatttattaaaaactggttcccgaagcaggaacgcggcagagcaaacgcggcgtggatcgtcggccagtcagtcgctcccgccattgcgatgccttttttcacctggtggataggcacccacggctggcgctccaacttctttttatgcgccgctcttgggttaatcccactctggctactttggcgatatgttgctgataaaccagaacaacataaaagtatcagcgagcaggaactggcttatatcaaagccgggcaggaaacggaaagcgcaggcagcagcgaaagttttatgttgcgggtaaaaccggtgattaccaactacagctattggttgctggtgctgtggtatctgtgtctgcaatgcctgtactgggggatgattacctggctgccgacctatctaaaatcagccagagggttcagttgggcggaaatgggctggctggcgtcgcttccctttgtcctgtcgatatttgccaaagcggccgcaggcgtcttcgtcgataaaataggacgcagcgcccccatattaatggtattaatgtttttcgctggcgtcagtatctatttcggcaccataaccgaacataaatatatgtcagcggtactcctctcctttgctgttgctttctgtacgatgggtacacccgttgcctggacgttattacagggaatgatacccggaaaatctatttccgccgccagcggcgtaatgaacggcgtcgccaatggactctcttcattatcccccgtatttatcggcttatttatttctatcactggaacttataccggcggcttactatgcctggtttttatcagcgctatcgccgtggtatcggcattaatcttaacgattaaaaaatattaattacgaggagtaaatgatgaaaattaccagcgttgatattattgatgtggcgaacgattttgcgtccgccaccagcaaatggcgtccggtggtggtaaaaattaataccgatgagggcatttccggttttggcgaagtcgggttggcctacggcgtcggtgcctccgcaggcatcggcatggcaaaagatttagccgccattatcatcggcatggacccgatgaataacgaagctatctgggaaaagatgctcaaaaaaaccttctgggggcagggcggcggcggcatcttttccgctgcgatgagcggcatcgatatcgcgctgtgggatatcaaaggcaaagcgtggggcgtgccgctgtataaaatgcttggcggcaaaagccgcgagaaaataagaacctacgccagtcagctacagtttggttggggggacggcagcgataaagatatgctgaccgagccggagcagtatgcacaggcggcactgaccgccgtcagcgaaggctatgacgcaataaaagtggataccgtcgcaatggatcgccacggcaactggaaccagcaaaacctcaacgggcctctcaccgataaaatcctgcgtctgggctacgaccgtatggccgccattcgcgatgcagtcggcccggatgtggatatcatcgccgaaatgcatgcctttacggataccacctcggcgattcagtttggccgcatgatcgaagaactgggcgtcttctactacgaagagccggtcatgccgttgaaccccgcgcagatgaagcaggttgccgataaggtcaatattccactggcggctggcgaacgtatttactggcgctggggataccgtcctttcctggaaaacggcagcctgagcgttattcagcccgatatctgcacctgcggcggcatcaccgaagtgaagaaaatctgcgatatggcgcatgtttacgacaaaacggtgcaaatccacgtttgcggcgggccaatttccacagcagtggcgctgcatatggaaaccgtgatcccgaacttcgtcatccacgaactgcaccggtatgcgctgctggagccgaatacacagacctgtaaatacaactacctgccgaagaacggcatgtacgaagtcccggagcttcccggcatcggccaggaactgaccgaagaaaccatgaaaaaatcaccaaccatcaccgtaaaataagccaactgtctgcctgcgccgcaggcagacaccctgtatttgcgagtcgtatcaacgcgaccttatccagcctgagataaaatcctctcagtaaaggggtaacacaggtggcaaatgaatttaactatccggcaatttcgcgcgtttctggccgtcgcggatttgcgtagttttaccgccgccagcaaatatctgtgcatcacgcagggagctgttagcggtttaatcaacgaaatggaaagccagatggaggtttcccttttcgaccgcacttcgcgcgtggtgaagctatcgcccgacggcgaaaagtttttacccgccgccatgcgggttgttgaagagtttcaacgggccgaaaattatgcccgcgacctgaaagagatcaaaaaatccctggtgcgggttgttggcgcgccgctgatcgcctgtgcttttctgccgcaaatcatccatgcctttaagcggcagcatccgcatacccacgtacagcttattgataagcccatgtcgcaattacaaaaaagcattatgttgggagaagccgattttggtatcggcccggagcggccgctggaaccggaaatcgacaaacaaacgctgttcacaacggaaatcgccctgtactgccatccggactatcggctgcataaaaaaacggttcgctgggaagagattcaaagcgaagagctgatcgccgttggcaacgaatccattccgatgatctccgcaaccgctggcgtgcgcattaagcccaaaatgacggtggaacatatggcgaccgccatgtcgctggcggcgcagtgtgaaggcgtggtgatcgccggaaccttttcccgccattacgccaaaagctaccaattagcgacctgttcgctcacgcctccgctgcggcgcaatatgaacctttatttccatgcgtggcgcgcacaaacgcccgccactcagcgctttagagattttttattcagctatgtcgatgaacatcatgatgccccggccaaccagcggtaggccggggattaaggcaggttaaatatcgatattcgctgctttcagggcgttctcttcgataaaggcacgacgcggctcaacggcatcacccatcagcgtggtgaacagctggtcggcagcaatcgcatctttgacggtcacacgcagcatacggcggctttccgggtccatggtggtttcccacagctgatccgggttcatttcacccagacctttataacgctggatagccagaccgcgacgtgattctttcaccagccactccagcgcctgctcgaagctggttaccggctggcgacgctcgccgcgttcgataaacgcatcctcttcaatcagaccgcgcagcttctcgcccagcgtgcagatacgacgatattccgcgccggtcacaaactcgtgatccaacggataatcggtatccacgccatgcgtacgcacgcgaacgatcggctcgaacagattctgttccgtattagtatgaacatcgaacttccactgactgccgtgctgctctttctcgttcagctcggtaatcagcgcattcacccagcgcgttacagtctgctcatcagaaagatcggcttcggtcagagttggctgatacaccagctctttgagcagcgctttcgggaagcgacgctccatacgaccaatcattttctgcgtggcgttatattcagagaccagtttttctaacgcttcgccggatagcgctggcgcatgagcgttcgcgtgcagagtcgcaccgtcaagcgcgatggaaatctggtactgatccatcgcttcgtcgtctttaatgtactgttcctgcttgcctttcttgactttgtacagcggcggctgcgcaatgtagacgtggccgcgctcgacgatttccggcatctgacgatagaagaaggtcaacagcagcgtacggatgtgcgagccgtcgacgtccgcatcggtcatgatgatgatgctgtgatagcgcagcttgtccgggttgtactcgtcgcgaccgataccgcagcccagcgcggtgatcagcgtcgccacttcctgagaggagagcatcttgtcgaagcgcgctttctcgacgttgaggattttacctttcagcggcagaatcgcctggttcttgcggttacgcccctgcttcgcagagccgcccgcggagtccccttccaccaggtacagttcggacagcgccgggtcgcgttcctggcagtccgccagtttgcccggcaggcccgctaaatccagcgcgcctttacgacgggtcatttcacgggcgcgacgcgccgcttcacgcgcacgcgcggcgtcgataattttgccgacgacaattttcgcgtcagatgggttttccagcaagtattcgctcagcagttcgttcatctgctgttccaccgccgatttcacctcggaagagaccagcttgtctttggtctgcgaggagaatttcgggtccggtacttttacggaaaccaccgcaatcagaccttcacgggcatcgtcgccagtggcgctgactttggcttttttgctgtagccttctttgtccatgtaggcgttcagcgtacgggtcatcgccgcacggaagcctgcaaggtgagtaccgccgtcacgctgcggaatgttgttggtaaagcagtagatattttcctggaaaccatcgttccactgcagcgctacttcgacgccgataccgtctttttcggtggagaagtagaagatattcgggtggatcggcgttttattcttgttcagatattcaacaaacgccttgatgccgccttcgtagtggaaatgatcttctttgccatcgcgcttgtcgcgcaggcggatggaaacgccagagttcaggaatgacagttcacgcaggcgtttcgccaggatctcatattcaaattcagtgacgttagtgaaggtttcgtggctcggccagaaacgtaccatcgtgccggttttatcggtatcgccagtgacggccaggggtgcctgcggcacgccgtgctcgtagatctgacggtgaattttgccatctcgctggataaccagttccagtttttgcgacagagcgttgactaccgagacgcccacgccgtgcagaccaccagagactttataggagttatcgtcaaatttaccgcccgcgtgcagaacggtcatgatcacttccgccgccgagacgccttcttccgggtgaataccggtcggaatgccacggccatcatccgttacggacacggaattatcggcgtgaatagtcacgacgatatctttacagtgtcccgcgagcgcttcgtcgatagcgttatctaccacctcgaataccatgtggtgcagaccggtgccgtcatccgtgtcgccgatatacatacccgggcgcttacgcaccgcatccagccctttcaggactttgatactggaggagtcataagaattcgacatcaacgtttctcgctcatttaatcttgggttaatccgttattttacccttttccacggtaaacatcttcgaattttcatccgacatgtctataacgtgttcagcgctaattgcgctgacaaagacctgcgattgcgtggcttttaagcggctggccagcagtccgcgacgcgcatcgtcaagttcagaggcaaaatcatctatcaggtacaggcagcgccgcccgctttcgcgggtgaggaactcgccctgcgccagacgtaaggcgcacatcaataactttagctgcccgcgcgacagggtatcttccaccggcgcgccgtcggcgcgaatgcgaaagtccgctttatgcggcccgtgcgcggtgtaggtcaacatacggtcacgctcaaagcttcgctccagcacgtccgcatagtctgtctctttctcccagccgcgctggaaagagaacgtcagggaaaattcaggtaaaaactgctgacaggtatccgccatgtcctgtgcgatagcgctactgtactccgcccgccaggtactaatttgttccgccagcggaatcagctctttatcccacgggcgcaattgctcataacgactcacctggcgcagcgcagcattacgctgtttcagcaatcgtttcaggttgctccaggcggtgaagaatccggcttcgttgtgaaagcatccccagtcaaggaacgctcttctgtatttggggccgccgttgagtaaagtaaacccctccggcgtaatcaactgcatcggcattaaatgcgccagctccgcgatcttgtgaccgtcggtaccgtcgatacggactttgctgtcgccctgcttatctttggttaagccaatcgacgtctcacgctcttcgccctgcaggcgcccgtggagaacaaacgcttcctgctcatgacgaatcacgcggccaggctgcaaactgcgaaacgcccgaccgtggccaagcgtatagatagcttccagcacgctggttttgccgctgccgttggcgccaaccaggaagttaaagccgggggataaagcgagatccgcattttctatgttgcggaagtctttgattaaaaggcgcgtcagtgacatatattagtacattcgtccaggggcgtgtgtgtcgcagccagttcgtctaccgccagcgcgcagaaagcggagcgtacacgaagtacgtgagcatttcgagcactgccgggaggcgaaatggcaagtaaaccagccccttttcagattctacagcctcattggcataacaacgtaggcagcactctgtgacgccgcatcctcaatctgtacgctggatacggaatccgtcagcataatgcgcacggtttcgcacttcagcgcattgagcacgtccagcacgtaactgacgttaaagccgatttccatctccgtcccgccgtagctcacgtccagaatctcttccgcttcttcctgctccgggttattggcggtgattttgagctgattctcactgacgtacagacgcacgccgcggaatttctcattcgagaggattgctgcgcgggcaaacgcctgcttgaggatatcgcagcccgcttccagatgtttatccggattcttcggcagaacgcgacggtaatccgggaagcgaccatccaccagcttcgaggtgaagataaagtcgccaacgtgcgcgcggatattattactgccgatctgcacgcgcagcgggttttcaccgccgtcgagcatacgcatcagttcaatcacgcctttacgcggcacaatcaccgagtggctgggtaaagacgcttccagcggcattgagcacaccgccaggcggtggccgtcggtcgcgacagtgcgcagttcgctaccttccgtttcaaacagcataccgtttaagtagtagcgcacatcctgatgagccatcgaaaactgggtcgcttcaatcaggcgcttcatcgtggcctgcggcagcgtaaattcaacttcgctttgccagtcgtcaagattcgggaaatcggcggcaggcagcgtagacagcgagaagcggctacggccagaacgcaccagcatccgatcgccttccaactgaacggcaatctccgcgccctccggcaggccgcggcagatatcaaagaatttccgcgccggcacggtagtggcgcccggctcatgcggctgagaaagcgtaacgcgcgcgaccatctccatttcaagatcggtgccggtcagagaaagcgtaccgtccgctacctggaggagcaggttaccgagaatcggcagcgtaggacgaccgcccagcgggccgctgacctgctgaagcggttttaataaatgttcacgttcaacggtaaatttcataggatcacgacgacaatgttctgattaaattcgaaaaatcttctttgatatcgtggctttcttcacgcagttgctcaattttacgacaggcatgaagtacggtagtgtggtcgcgcccgccaaacgcatcgccgatttccggcagactgtggttggtgagttcttttgccagcgccatagccatctggcgcggacgtgctaccgagcgagatcgacgcttagaaagcagatccgcaattttgattttgtaatactcggccaccgtcttctgaatattgtcgatggtgaccagtttttcctgcaacgccagtaaatcgcgcagcgcttcgcgcacaaagtcgatagtaatcgcccggccggtaaagttggcattggcgatcacccggttcagcgcgccttccagttcacgtacgttagagcgtagacgcttggcgataaagaacgctacttcgcctggcagacgaatatcattttcgtccgcttttttcatcaggatcgccacgcgggtttccagctctggtggttcgatcgccactgtcagcccccaaccaaagcgggacttgagacgatcctcaacgccgttgatctctttcggatagcgatccgacgtcaaaatgatctgctgattgccttccagcagagcgttaaaggtatggaaaaactcttcctgggatcgttctttattggcgaagaattgaatatcgtcgatcagcaatgcgtcaacggagcggtagtagcgtttaaactcttcgatggcgttattttgcagggcttttaccatgtcctgcacaaagcgctcggagtgcatatacacgactttcgcgttgggtttgcgcgccataatgccgttacccaccgcgtgcagcaggtgagttttacccagaccggtgccgccatagaggaataacgggttataagcgccgccaggattatccgccacctgacgtgccgccgcgcgcgccagttggttggatttaccttcgacgaagttatcaaatgtatgtttaacattgacgttggagcggtaggtcggctccgccggcgctggtacgttatcccagcccgaacgggccgcaggcgctacgcgctgcggctgcgccgtcgttgtctgcgtaggcgcgacaacgttatgcacaggcgtttttagcgtttgcgtaacgggctttgttcccacttcaaaacgcagttgtggggcatccgcgccgcagaatgtgttgagtaatccattgatattgttgaggtacttatctcttacccaatcgagcacaaaacggtttggcgcatacaaagccagcgtgttatcgctcagttccgcctgcaacgggcgtatccacatactgaattctgtggctggtaactcatcctgcaatcgggcaagacactgctgccaaagcgaaagtgacacggcggactccactcgaacaaaagtcgataaatgacaaaggctgatacattaatgattgttggcgcacgtcgataagaccctgcatgaagggtgacgcacgaaccgctgtctgcggttttcacggatctttcaaacgatcgcgacttcacgcagtctgaaagatttcgtgttcatgcctgaccaggatcgtttgaaacgatcaggaccgcggatcatagcctaaactgagcaagagatcttctgtttctcacagattcttcccgatttatccacaggactttccaggaaaggataagtgtaatcgatcctggggaactcctgtacgctttcgcgcgcatattgaaaaaattaataggtaaaggtgagcagacgcctaaaagatcgcataaagatccagggcgatccttgcgctttacctggcagtccgtataattctccacccgtcgcgcaatgcccgtcatatggcgtcaacgctgcttattttccgcacaaaaaggcgtggaaaatcgcgggaaaataaggaaagagaattgactccggagtgtacaattattacaatccggcctctttaatcacccacactgtggcgtaagtcgttcaaagtttgttcgggtatacgcaaaagtcagtgaatttattcaagtttaggtagaaatcgccatgaaacgcacttttcaaccgtctgtactgaagcgcaaccgttctcacggcttccgtgctcgtatggctactaaaaatggtcgtcaggttctggcacgtcgtcgtgctaaaggccgcgctcgtctgaccgtttccaagtaataaagctaacccctgagtggttaagctcgcatttcccagggagttacgtttgttaactcccgctcatttcacattcgtcttccagcaacctcaacgggctggcacgccgcaaatcaccatcctcggccgcctgaattcgctggggcatccccgtatcggtcttaccgtcgccaagaaaaatgttcgacgtgcgcatgaacgcaaccggattaaacgtctgacgcgtgaaagcttccgtctgcgccagcatgaacttcctgcaatggatttcgtggtggtggcgaaaaaaggggttgccgacctcgataaccgtgctctctcggaagcgttggaaaaattatggcgccgccactgtcgcctggctcgcgggtcctgatagcccttattcgggtctatcaacgcctgatcagtccgctgcttgggccgcattgtcgtttcacgccaacgtgctcaagctacggaattgaggcattgcgcaggtttggagtgataaaaggcagttggttgacggtgaaacgcgtattaaaatgccaccctttacaccctggtggtgacgatcccgtcccgcccggaccatttgataccagagaacactaacgatggattcgcaacgcaatcttttagtcatcgctttgctgttcgtgtctttcatgatctggcaagcctgggagcaggataaaaatccgcaacctcagactcaacagaccacgcagacaacgaccaccgcagcgggtagcgccgccgaccagggcgtaccagccagtggccaggggaaaatgattacggtgaaaaccgatgtgcttgatttgactatcaacacccgtggtggtgatgtcgagcaggccttgctcccggcttacccgaaagaactgggttccaacgaaccgttccagctgctggaaaccaccccgcagtttatctatcaggcgcaaagcggcctgacaggccgcgacggcccggataacccggcgaacggcccgcgtccgctgtacaacgtcgagaaagatgcgtttgtactggccgacggtcagaacgaactgcaggttccgatgacttatactgacgccgcaggcaacacgtttaccaaaacgtttgtctttaagcgtggcgattatgcggttaacgtgaactatagcgtgcagaacgccggcgaaaaaccgctggaagtctccacctttggtcagttaaaacaatccgtcaacctgcctcctcatcgcgacaccggcagcagcaactttgcgctgcatacgttccgcggcgcagcgtactccacgccggatgagaagtatgagaaatacaaattcgacaccattgccgataacgaaaacctcaacgtcagctccaaaggcggttgggtggcaatgttgcagcagtatttcgctaccgcatggattccgcgtaacgacggcaccaacaatttctacaccgccaatctgggtaacggcattgtcgctatcggctataaagcgcagccggtactggtacagccaggccagactggcgcgatgaccagcaccctgtgggtcggcccggaaattcaggataaaatggcggctgttgcaccgcacctggatttgaccgtggactacggctggttgtggttcatctctcagccgctgttcaagttgctgaagtggatccacagctttgtgggcaactggggcttctccattatcatcattacctttatcgttcgcggtatcatgtacccgctgaccaaagcgcagtacacgtcaatggcgaagatgcgtatgctgcagccgaaaattcaggcgatgcgcgaacgtcttggcgatgataaacagcgccaaagccaggagatgatggccctgtacaaagcggagaaggttaacccactgggcggctgcttcccgctgatcatccagatgcctatcttcctggcgttgtactacatgctgatgggttccattgaactgcgtcatgcgccgttcgcgctgtggattcatgacctgtccgcacaggacccgtactacattctgccgatcctgatgggcgtaacgatgttcttcattcagaagatgtcgccgaccaccgtgaccgacccgatgcagcagaagatcatgacctttatgccggtcatctttacggtgttcttcctgtggttcccgtcaggtctggtgctgtactatatcgtcagcaacctggtcaccatcattcagcagcagctgatctaccgtggtctggagaagcgtggcctgcatagccgcgagaagaaaaaatcctgattcggtgtaggccggataaggcgaagccgccatccggcaaggcgcgccggtcagcctgatggcgctaacgcttatcaggcctacaatcaaaaggcggtcatatgaccgcctttttttattgcaacaaagttgagactaaccatgagccataacgacactatcgtcgcccaggcaaccccaccgggacgcggtggcgtgggtatcctgcgtatttccggtctgaaggcgcgcgacgttgcgcaagaggtgctgggcaagctgccgaagccgcgctatgccgactacctgccgtttaaagatgttgacggcagcgcgctggatcagggtattgcgctgtggttccccggcccgaactccttcaccggtgaagatgtgctggagctacaagggcacggcggtccggtgattctggacctgctgttaaaacgtatcctgacgcttccaggcgtgcgcattgcccgaccgggcgagttctccgagcgagcgttcctcaacgataagctcgatttagcccaggcggaagccattgccgacctgatcgatgccagttccgaacaggcggcgcgttcggcgctaaactcgttacagggggcattttccgcccgcgttaaccaccttgtggaagcacttactcacctgcgaatctacgtcgaagcggctatcgattttccggatgaggagatcgactttctctctgacggcaaaatcgaagcgcagctcaatggtgtcatcgccgatcttgacgccgtgcgcaccgaagcgcgccagggcagcctgctgcgcgaagggatgaaggtagtgattgccggacgcccgaatgccgggaaatccagcctgctgaatgcgctggcaggccgtgaagcggccattgttaccgatatcgccggcaccacgcgcgacgtgttgcgcgagcatattcacatcgacgggatgccgctgcatatcatcgataccgccggactgcgcgacgccagcgacgaagttgagcgtatcggcatcgaacgcgcctggcaggagattgaacaggccgatcgcgtgctgtttatggtggatggcaccacgacggacgccgttgaccctgccgacatctggccggactttatcgcccgtctgcccaaaaatctaccgattaccgtggtacgtaacaaggcggatatcaccggcgaaacgttgggtattagtgaagtaaacggtcactcactggttcgcctctcggcgcgtaccggcgaaggcgtcgacgtgttgcgtaaccacctcaagcagagcatggggtttgataccaatatggaaggcggcttcctggcccgccgccgtcacctacaggcgctggcggaagccgctgaacaccttgagcagggcaaagcgcagctattaggcgcatgggcgggggaactgctggcggaagagttgcgcctggcgcagcaaagcttaagcgagattaccggcgagtttacctccgacgacctgctgggacggattttctccagcttctgtatcggcaaataacgttgtgttgcccggtggcgcgatgcttaccgggcctacaaaacccgtaagccggataaggcgtttatgccgccatccggcagcaatgatttcccatgcggaaatcactgttgtccaaatggcaactcgtctcgcgcaacgtcgccccgtattcttagcgccacacttttcgtgaggccgctatgaaacgttttctactgtgtagttttgccctggttttactctatcctgccggtattgatatgtatctggtcggtttaccgcgtatagccgccgatctgaacgccagcgaggcgcagttgcatatcgccttctccgtttacctggccggaatggcgacggccatgctgtttgccgggaagatagccgatcagtcaggccgcaaaccggtcgcgatcgtcggcgcgatcgtctttatgatggcctcactgctttgttcacgggcgtcggaaggctcgctatttctgagtgggcgttttcttcagggaataggtgcaggcggctgctatgtggtggcgttcgccattctgcgcgacacgctcgacgagcatcgccgggcgaaagtgctgtcattattgaatgggattacctgtattgtgccggtactcgccccggtggtggggcatttgattatgcttcgtttcccctggcaaagtctgttctatacgatgtccgcgatgggcattattgtgggcctgttatcactgtttatcctgcgcgagacgcgcccggtaaggctggctccacgcgatttatcacgatcgtcgcccgccgccgagtcgctgattaaccgttttttcgttagtcgactggcgatcaccacccttagcgtgtcggtgatcctgacctttgtcaatgcctctccagtgctgctgatggaggtgatgggatttagccgtggcgactatgccattaccatggcgctcaccgcaggcgtcagtatggtcgtctctttttccaccccttttgcgcttgggttatttaagccgcgaaccttaatgctcgtctcacaggggctgtttttgacggctggcgtgacgttaagccttgctcataccaataccgtcacactctttggcctgacgcttatctgcgccggattctcggttggttttggcgtcgcgatgagccaggcgctggggccgttttcgctgcgcgccggagtggccagttccacgctcggtatcgcgcaggtttgcggttcatcactgtggatttggctggcggcaatactcggtatcagcgcgatgaatatgctgatcgggattctgattggttgtagcatagtgagtattctgctgatcttctccgtcacgcccaacaggtccgtagccgagcatgaagaaatcccttaccaatctcgaccttaatttgctgttatgcctacagttactcatgcaggagcgcagcgtcactaaagctgcaaaacggatgaacgtaacgccctcggcggtcagcaaatcgctggcgaaactccgggcatggtttgacgatccgctgttcgtcaatacgccgctgggcctggcgccgacgccgctgatggtcagtatggagcaaagtctggcggactggatgcagatggggaatcaactgcttgataaaccgcatcatcaaacgccgcgcggtttaaaatttgagttggcagcagagtcgccgctgatgatgattatgtttaattcactgtcgcagcagatttatcagcgctatccgcaggctaccattaaggttcgcaactgggattatgactcgctggaggcgattacgcgcggggaagtcgatatcggatttaccggacgcgaaagccatccccgctcgcgagaattgctcagtctgttgccgctcgcgattgattttgaggtgttgtttagcgatttgccgtgggtctggctgcgggaagatcatccggcactgcgtgaagcgtgggatctggacacttttctgcgctacccgcatatcagtatttgctgggagcaaagcgatacctgggcgctggatgatgtcctgcaagaaatgggacgcaaacgccatatcgcgttgagcctgccggggttcgagcagtcactctttatggccgcccagccggatcacaccctgatagcaaccgcgccgcgctattgccagcactacaatcagctccaccagctaccgttagtggcgcgccccctgccttttgatgcgcaacagcgggaaaagctgatggtgccgtttaccctattatggcacaaacgtaatagtcataatcccaagattgtgtggctacgacaggctatcaacacgctctgccgtcgccttatctgaccacctgcgttgataaattaaccttcctcttaccagaaatgtcaccgtctgattaaagaaccttctgaaattgaatttttagcgcgtaaaacctgtccataatttacgttaatgttactctcgtcattatcacggcccattaatcacggagcgaaaaatggcgactcactttgccagagggatacttacggagggacagttggtttcaattcgtctctcttcgtcttgccatattgaagccagaaacctgcctgctcaccgacgaacgcgttttctcgcctccagaggccttcttgccgaactgatgtttatgctgtacggaattagcgagctgccggaaatcattattcaggcgaaaggtaaacccgcgtttcgtgacaaaaatctgccaggcttttctatctcctacgccggaaatatggttggcgtggcgttgaccaccgaaggagagtgcgggctggatatggaattacagcgcacctcccgcggctttcaccatccgcattcgctcgaacgccaccctttctcccgtaatgaaaacttatgggtagccaatcaaaacgatcccaacgaagcgcgagcgcaactcattacattgcgccagagcgtgttaaaactcaccggcgatgtcatgaatgacgatccgcgggagctgcaacttttacccgttgccggacgcctgaagtgcgcgcatgtcacgcagcttgaagccgtatgcgatgcggaagatgtactggtatggtccgtaaccgttacgccagcgatagaaaaattaaaagtgtgggagttcgatggcaaactgggctggaaaagcctgcccgatatccagacgcgcgccaatgagccaaccggtcgtctgatgcgattcgcccaactccccgccgccaaatcgtatacgcttaatcgttcataatgaaaaaaggggcacgtatgtctgaaacgctgaatgtggttacactgctgggaagtttacgcaaaggttcctttaacgggatggtggcgcgtacgctgcctaaagtcgcgccggcaggaatgacggtatcgccgctgccttcgatcggggatattccgctgtatgacgccgatatccagcaggacgagggatttccagccagcgtagaggcgctggcggagcagattcgcaacgccgacggcgtcgtcattgtgacgccggaatataactattccgttcccggcggcctgaagaatgccatcgactggctatcccgtctgcctgagcagccgctggcgggtaagcccgttcttatccagaccagttcaatgggggcgattggcggcgcgcgctgccagtatcatctgcgccagattctggtgttccttgatgcgatggtgatgaataaaccggaatttatgggcggcgtgattcagaataaagtcgatccgcaaactggagaagtggtggatcagggaacgttagatcatttgaccggtcagttgaccgcatttggcgagtatattcagcgcgttaaagcgtaagttcgttaaaaaccctcaccccgatggggcgagggttcatttcatcagtgtgcgtcaataaacacaatcttcagcacgaataacagcgcgacaatcactacgcacgggctaaggtcgcgcaggcgaccggtaccgattttcatcacgcagtaagagataaagcccagcgcgataccttcggtgatcgagaagctaaacggcatcattaccgccgtaataaacgccgggaccgattcggttaaatcctgccagtttacccgcgccaggctggaggtcatcagcacgccgacgtaaatcaacgcgcccgccgccgcgtaaggcggcaccatgcccgccagcggcgacaggaagataaccagcaggaacaaaataccgaccaccaccgccgttaaaccggtgcgaccgcccaccgaaacgccggaagacgattcaatataagcggtcacagaagacgttccgacaaatgcgccagtgacagaagagatactatcaacaaacagcgcctgcttcatgcgcgggaacttacctttcgcatccgccaggcccgctttatcggtcacgccgatcagggtaccggaggagtcgaacaggttaaccagcatgaaggagaaaataacccccgccaggccaagattgaacgagcctgccaaatcgacatgccctaccacgctggtgacgcttggcggcgcggagacaatgccgttgtagtgtacatcacccatcatccagccaagcagcgtcgtgacgatgatggacaccagcaccgccgcatgaatgttgcgcgaagcgagaatcgcaataataaagaatccgagaacccccagcagcacgctgtgcgaggtcaggttgccgatgctgaccagcgtttccgggttagcgacgatcacgccggcgtttttcagccccatcatgccgataaacaggccgatgccgctggtgatgcccacgcgcaggctgaccggaatgttggcgatcatccagtaacgcacgcggaagatagtcagcaataaaagaccaacagcgccccagaaaatggcgcccatgcctacctgccacggcagtcccattgcctgcacaaccacgaaggcaaagaacgcattcagccccatcgcgggcgccagcgccaccggcaagttagcgaacaggcccatcagaatactgccaaaggccgcaatcagacaggtggtcacaaagacggcgctggtgtccatgccagctacgcccagaatttgcgggttaacaaaaacgatataaaccatcgtcaggaaagtggtaaaaccggcgatcacttcggttcgtgccgtcgtgccatgttcgcgcagtttaaacacgcgttccagcataccctgaccagaagcctgggtggtgtgttgttgactcattatcaatttccggagaaaggagggaaaattcgccgttatcctataccaaaatgcgacacctggcgcagttgtgtggtaatttttttcactcaatttgttagtacggcaacgattgcgtcccctcattcagcattacgtaaacgttaaacttgttaaaatggaaatgacatgtcccaaatcgaagcggtgttttttgactgtgacggcacgctggtcgacagtgaagtaatttgctcgcgcgcctatgtcactatgttccggcagttcggcattacgcttaagctcacggaagtattcagacgctttaaaggcgtaaagctctacgaaattatcgataccatcagtaaagagcatggcgttgcgctggcaaaggcggagctggagccggtgtaccgcgcggaagtggcgcgtctgttcgataccgaactggaagcgatcgcgggcgcaaataccctgctggagagcattaagacgcctatgtgcgtggtatccaacggaccggtcagtaagatgcagcattcgctgggtaaactgggcatgttgcattattttcccgatttgctgtttagcggttacgatattcaacgctggaagcccgatccggcgctgatgctccacgcggcgaacgccatgaaggtcaatgttgagaagtgtattctggtggatgattccagcgcaggcgcgcagtcaggaattgcggcgggaatggaagtgttttatttctgcgccgatccgcataacaagccgatcgatcaccctaacgtgacgacttttaccgatttggcgcagttgccgggattgtggaaagcgcgcgggtgggagattacgcgttaactgaaatgccggatggcgctgacgcttatccggcctacagcatctgtacctgtaggcccggtaagcgcagcgccaccgggcaaaagaatgagatttactctttcggatctttccccgccaacagtttatccagctcatcgccgccgacgtgacggaaatcctgccccttcacgaagtagaagatgtattcgcagatattctggcagcggtcgccgatacgctcgatagaacgagcgcagaataacgcggtcagcacgctgggaatggtgcgcgagtcttccatcatgtaggtcatcagctgacgcacgatgccttcatattcctggtcaactttcttatcttcacgatagatacgcaccgcttcatcgagatccatgcgcgcgaacgcatccagcacgtcgtgcagcatctgtacggtgtggcggcccagtgactccagactcaccaacagcggctggtgctgctgggagaatttctccagcgcggtacggcagattttatccgccacgtcgccaatgcgctccagttcggcgatggttttgataatcgccatcaccagacgcagatcgctcgccgtcggctggcgcttggcgataatacgcacgcaggcttcatcgatggcgacttccatcatattaacctgatggtcgccttctaccacgcgcttcgccagctcgctgtcctggttgtgcatggcggtgatagcgtcagaaagctgctgctccaccatgccgcccatggtcattacctgagtgcggatactttccagttcggcgttgaactggccggaaatatgtttattaaggttcagactgtccattacgcactcctgaattaaccgtaacgaccggtgatatagtcttctgtttgtttcttcgcgggcttggtgaacagatcgtccgtgttgctgaactcaatcaactcgcccaggtacataaacgccgtatgatcggagcaacgtgccgcctgctgcatgttgtgggtcacgatcaccacggtgtaatcctgtttcagctcggtgatcagctcttcaatacgcccggtagagatcgggtccagagctgaacatggctcatccaacagcaacacttccgggcgaatggcgataccgcgcgcaatgcacagacgctgctgctgaccaccggagagagagtacccgctctggtgcaatttatctttggtttcgttccataatgcggctttggtcaacgcccactgcacgcgctcgtccatatcggcgcgagacagcttctcaaacagacgcacgccaaaggcgatattgtcatagatggacatcgggaacggcgtcggcttctggaataccatccccacttttgcgcgcagcagcgcgatatcctgggtgttggtgagaatattgtcgccatccagcagaatttcaccttccgcgcgctgctccggataaagcgaatacattttattgaaggtacgcagtagcgttgatttaccacagccggatggcccgataaatgccgttacctgattcttcgcgatatccagattaatgttcttcagggcatggaatttgccgtagtagaagttcaaatcacgaacctgaatcttactcggggcagtttcaaccatactcatttcactcttttcctcatccagcgccgcatccgccacgccgtaaaataatgcctgatggcgctacgcttatcaggcctacaatgtctttaaccgtgttttttcttcgcgaaaacaacacgcgccagaatattcagcagcagtacgcacagggtaataatcagcacgcccgcccaggctaattgttgccattcggcaaacgggctcatcgcgaatttaaaaatggtcaccggcaggttggcgatcggctgcatcatgtcggtgctccagaactggttggagagcgcggtaaacaacaatggcgccgtttcgccggcaatacgcgcaatagccagcaggataccggtcataatgccggagatagaggctttcagcgtaatcgcggaaatcatcttccacttcggcgtacccagcgcataagcggcttcacgcaggctatccggcaccaatttgagcatgttttcagtggtacggataacgatcggtacctgcaacagcgccagcgcaatcacccctgcccagccggagaagtgctgcatctgcgccaccacgatggtgtaaacaaacagccccacaacaattgacggcgcggaaagcagaatgtcgttaataaagcgaatgatttccgccagccaggatttacggccatactccgccagatagatcccggccataatccccagcggcgtacccaatacggtagcccagagaatcaacaatccactccccgccagggcgttcgccagcccgccgcccgccgtgttcggcggcggcgtcatttcggtaaacagcgccagcgacataccatcaatgccgcgcgtgatggtggacatcaaaatccagatcagccagaacaggccaaatgccatcgtcgccattgagagcgttagtgcgatacggttcttcatgcggcgacgcgcctgcatcttgcgacgggattccgcgagctgcgcggtgttctgcatatcaagcgtagccattaacgtgctccctcgttcttcgccagacgcataatcatgaacttagacgccgccaggacgataaaggtgatcacaaacaggatcagccccagctccatcaacgctgccacgtgcaggcccgattccgcctcagcgaattcgttcgccagcgcggaagtgatgctgttgcccggcatatacagcgacgcgctgtcgagctggtaagtgttgccgatgataaaagtgaccgccatcgtttcacccagagcacggcccagccccagcataatgccgccgatcacgccatttttggtgaacggtagcacgatgcgccagataacttcccaggtagtacagccgataccgtaagcggactctttcatcattaccggtgtttgctcgaagacgtcgcgcataaccgccgcaatgtaggggatgatcatgatggcgaggatgacgcccgccgccagaatgccgataccaaaggccgggccggagaacagcgcgccgacaaacggaatgttggaaagaatattgccgaccggctcctggaagtacgtcgcaaacagcggcgcgaagataaacagcccccacatgccgtacacgatactgggaattgccgccagcagttcaatggcgatgccgagcggacgctttagccagcctggcgccagctcggttaaaaacagggcaatgccgaaactgaccggaacggcgatcagcagtgcgataaaggaggtcaccagcgtgccataaatgggcaccagagcgccgtagatatcgtttggcgcgtcccattccttagtccaaagaaatgagaaaccaaatttctgaatacttggccaggaggagatgatcaatgagacgataataccgcccaacatcaatagcacaatcagcgcagccagttttaccagcgcgctgaaaatcatgtcgccttttttacccggcgggttaaaagcaggcttggttgcagccataaattactctttccattaaacgcattttacgacgttgcccctgccggatggcgctacgcttatccggcctacaacgtgggcctgcggtcgaaaccgtagggcggataagcgtagcgccatccgccaattcgttaattaatacagcgccttaccgttgctgtcttttatactggtcttccatgcagcacgaacctgctcaacaacgttatccggcaggctggcgtagtccagatcattcgcctgcttagcgccatttttgtaggcccagtcgaagaacttcaacacttcagcaccctgctcaggtttcttctgcgctttgtggaccaggataaacgtggtggaagtgattggccacacatcgtcacctttctggttggtcagatcctgcgcgaaggttttgctccagtctgcgcctttcgccgcattagagaagctctcttccgtcgggcttaccggtttgccgtcggcagaaaccaatttggtgtaggccaggttgttctgcttggcgtaagcgtattcaacgtagccaatagcgcctggcagacgctgtacaaatgctgcgatgccgtcgttacctttaccgcccagaccggttggccagttcacggtagaacccgcgcccactttcgatttccactcgtcgttgactttcgccaggtaactggtgaacacgaaggaggtaccggaaccgtcagcgcgacgcaccacagcgatattctgtgagggcagcttcacgcctgggttcagtttggtgatggcttcatcatcccacttcttgattttaccgaggtagatgtcacccagcgttttaccatccagcaccagttcaccggatttgaggcctggaatattcaccgccagcaccacgccgccgatcaccgtcggaaactggaacaggccttcctgattcagtttttcgtcagacagcggcgcatcggaagcgccaaaatcaacggtattcgcggtgatttgtttcacgccgccggaagagcctatcccctggtaattgactttgttaccggtttctttctggtaggtatccgcccatttggcatacaccggcgcaggaaacgttgcaccggcacctgtcaggcttgctgctgcaaaggcagagaacgcgctcatcgataaggtcgcggcgacaacagttgcgacagtggtacgcataactttcataatgtctcctgcacggtttcggtaaatcgttgtttgagttgctacgatgagcaaaataggacaaattgatgacagttatatgtcttgattatgacggtttgatgacaatggaaataaaaaagctggcccggggagacaccagaccagcctgcagggggagatgaattaaactgtttgcgcaaccgcagacggtttcaacagcgcgtacatcaggccgcaaacaatcgtgcccagggcaatcgagagcagatattgcatcacatgttctaccgcatgcgggatcgccaggacaaagagaccaccgtgtggcgccatcagtgtacaaccgaaatacatggacagtcccccggcgattgcgccaccgaccatcgtggaagggatgacgcgcatcgggtcacgcgcagcgaagggaatcgccccttcagagataaagcacagccccaggataaaggatgcgttacccgcttcatgctcagaagcagtgaatttcgctctggccgcccaggttgcgacgcccatccctaatgccggtaccatccctgccgccataatggccgccatcggcatataggaatgagaagccagtaaaccgacgccgaaggtatacgcagctttattcaccggcccaccaaggtcaaaaccttgcattgcgcccagcaacattcccagcaagatagcattcgtagaggtcatattccccaggaacgtcgtcagcccttccatcaccgcagacaccgggccacccaccacgtaaatcatgattaggccggtaatcagcgtagacagtagcggcagaaccagcacaggcttaagcgcttccattgacgctggtagcttaatattttgcgccagaaaccgtacgctgtaaccggccagaaaaccggccacaatccctcccaggaaaccagcaccgcacaggctggccaacatcccgccaataagccccggggccagacccggacgatcggcaattgagaaggcaataaacccagccagtaccggcaccatcagcgcaaaggccgccttaccaccgatttgaaataacgcagccgccagcgtgcccggctcattgaaggcctggataccgaagacaaaagagagcgcgatacacaatcctcccgccaccaccaaaggaagcatatgggatacgccggtcattaaatgcttataaacgccgggtagctctgttttaccagctgaagaagagcgcccggcactcccctgatagacctcggcgctattgaaagcattatccatttcctgcgcactcttttttagcgccgcgccggtactggtgcgatagagtcttttgccaacaaagcctgacagatccagctcaatatccgccgcgataatcaccacatccgcttgcgctatctcttccgcggtcagcgtgttcttcgccccgacggaaccgcgggtttcaaccttgatccagtcaccacgcttgcgggcttcaatttccaacgcttctgccgccataaaggtatgggcgacgcccgtcggacaggccgtcacagcaacaatttttttagtcatagtagggtaccctgttcttttaatttaaagaaaaagcgggaaaaaatgttacagacgtgaccaggccgcggctttctggaacagcgcgtcgtccgggcgaatcccggtataaaggacaaattgttccacggcctgaatagcaaacacttcggaaccggtaatcacggttttaccgcgttcacgggcgtagcggatcagcggcgtgacgggcggtagcgccaccacatcaaagataacgctcgccttatccacttcctgttcggaataagagagtttgtcggcatcattaccgccagccattccgataggcgtggcgttaattaacaaatcggcttcaataccgtcggtatccgggcgccattcatagccatagagttcggccagttgtttacctgacgcttcatcaatcgcgacaatataaccacgggtaaaccccgcatccttcagcgcgcaggccaccgcctttgccataccaccgctgccacgcaaagcaaacaccaggtcgggagagaccttgtaactcgccagcaagcgagctattgcaatgtaatcggtgttgtacgccttcagatggccattggtattcacaatggtattaactgagtgaatggcctgagcagaagcatccagttcatccaccagcggaatgcaggcttctttaaacggcatagagatcgcgcacccacgtatccccagcccgcgcacgccgctaatggcctgcgtaagatcggtcggcgagaaagctttgtagagataattgagatccagcgcttcgtacagatagttgtgaaagcgtgtaccgaagttacttgggcgtgccgccagggacatgcagacctgcgtgtctttattaatgcgctttgtcatgatgaatcctcatagaagttgcgatagggaaaatcatcggctaaaaaggggatattaaaaattgctcattcccgttcgggaaatttcaccttttatgacaacccggcacactgaacaaaaatacttaaagctactccagcactatggcgacaagcctgttagcgtgacattacaggagctggcggatgtgttgttctgcacccgacggcatatgcgtaatctgttgcttcagatgcaggaggcaaagtggctcatctggcaatcacaggccggacgtgggcatcgcgcccggcttcacctgcgctataaaccagaacagctgttaagcgaaaaggcggagcagttactggagtctggtcatattgatcaggccattcagctgctgggtaaaaataagcaccaggtggcgcaactgctgcgttcaaagctgggctatagcgtgcgggcagactatcagcggctgtgcatcccctattatcggacaatgccgtcgctgtgccccggcataccgttgcgtcgctctgagcagcatctggtcaggcagatttttagcggcctgacgcgcataaatgaggaaaaaggtgaagtcgaagccgatcttgcccaccactggcggcagattgatccactgcgctggcgtttttatctgcgccccgccgtcctctggcatgatggtcaggagctgacgatcgacgcggttatcgcttcactgacccgcagcgctaagctgccgttgttctcgcacttgcagaccattcaggccaccgggccgctgagccttgaaattacgctggcgcacccggataaccgactgccgctgctgctcagtcatattgatgccatgatcctaccgcctgaccatacacaacgcgctgatttcccggcacatcccgtgggaactggcccttatgaggtggtggaaaacaatggctttcatctgcaaatgaaggcctttgaccactatttcggtctgcgcgggctgctggatgaagtggaggtctttatctggccgaatttaacggagacagataacctggcggaatcgctgtcggataacgacacggcagcctggctcagttccagcctgagcgatgaggattacgtttccggacggcttagccaggtatcaggcaaaccttctgacaacctgcgcgagatgtttcttgagcgtggaggctattttttattatgcgacagtcgctctccgcactggcataccgccgaacatcgccgctggctgcgggaaacactcagcccttacgccttactccagcatctgagtgaggcaattcgccccttctgggtaccgggcggcagcctactgtcctcctggtttcatactattgaggcgggcccagcctgttcaccttttatctcgtcgtcgccctacgcaaaactgcgtctggcctatcacgatcagcaccctgaatttccgatgctcctggatatcatgcaagagatcatgcgccagcagggcattttacttgagggcgtggagctgaattatgatgactgggcgaatggcaaagccaatgtggatctctggctggggacggtcaatttccccattcccgaagagtggaacgtcggtacatggctgctgggctcccctttactgcgccacgccatcagcggtggggatgatgcgctgctggcccaatgggaaacccagtggcatgccgaaaccatcagcgcggaacaactggtcagggaaaccacccgttcaggctggctacagccgctttttcaccactggatgcgactcaaaggccccgaccgggccagggggatccacctgaataacctgggatggtttgatttccgatccacctggattgagccagggccttaaagaagagaatgtgaccgggtacccgtagcgcaggtaggcgtagcacctcttagtcgctcttcagccaccatagagaaagaacagcgcctgtcacggcgcacaaaaaaaggccgtctatcgacggccttctgcctggtactacatttgtacttactctacggtaaccgatttcgccaggttacgcggctggtcaacgtcggtgcctttaatcagcgccacgtgatacgccagcagttgcagcggaacggtgtagaagataggcgcaatgacctcttccacatgcggcatctcgatgatgtgcatgttgtcgttgctgacgaaacccgcatcctgatcggcgaagacgtacaactgaccgccacgtgcgcgaacttcttcgatgttggatttcagtttctccagcagttcgttgttcggcgccaccacaatcaccggcatatcggcgtcaatcagcgccaacggcccgtgtttcagctcgcctgcagcataggcttccgcgtgaatgtaagagatctctttcagcttcagcgcgccttcgagcgcaatcggatattgatcgccacgccccaggaacagcgcatggtgtttgtcagagaaatcttccgccagggcttcgatacgtttgtcctgcgacagcatctgctcaatacggctcggcagcacctgtaggccatgaacgatatcatgctcaatggacgtatccagacctttcagacgcgccagtttcgccaccagcatcaacagcacggttaactgggtggtgaaggctttggtagatgctacgccaatttccgtacccgcgttggtcatcagcgccagatcggattcacgcaccagcgaagatcccggcacgttacaaatggccagagagcccaaatatcccagctctttcgacagacgcaggccagccagggtatctgccgtttcgccagactgggagagcgtgatcatcaggctgttacggcgcacggcagatttgcgatagcggaattcagaggcgatttcaacgtcgcacggaatacctgccagcgattcaaaccagtaacgggaaaccataccggagttgtaagacgtaccgcaggcgaggatctgaatatgctcaaccttcgacaacagatcatcggcgttcggtcccagctcgcttaaatccacctcaccgtggctgatgcgcccggtaagggtgtttttgatcgcgttcggctgttcgtagatctctttctgcatgtagtggcggtaaatacctttatcgcccgcgtcatattgcagattagattcgatatcctgacgttttacttccgcgccggtgttatcgaagatatttaccgaacggcgagtgatttcagcgatatcgccctcttcaaggaagataaagcgacgagtcactggcaacagcgccagctggtcagaagcgataaagttttcgcccatacccaggccaatcaccagcgggctaccagaacgtgccgccagtagggtatccgggtgacgggtatccatgatcactgtaccgtacgcaccacgcagttgcgggatagcacgcagaacagcctcacgcagagtaccgccctgtttcagttcccagtttaccaggtgtgcaatcacttcggtgtcggtttcagaaacgaaggtatagccacgcgcttttaacgcttcacgcagcggttcatggttttcgatgatgccgttatgcaccaccacaatgtgttcagaaacatgcggatgcgcgttagcttctgaaggttcaccgtgcgtcgcccagcgagtgtgagcaataccagtgccgccatgcagaggatgttcttccgctgcctgagccagcatctggactttaccgaggcgacgcaggcgggtcatatgaccttctgcatccaccacggccagaccggcagagtcatatccgcggtattccagacgacgtaaaccttcgagaaggatttcagctacatcacgctgcgcgatagcgccaacaattccacacatagttttatttcctgattatggcattacgccatgcgttgtcgctgacctgtatgcccgtcgttgcgggcgccccgagccttgtagagagtggggttatttttataagtactgctcatggagcggaggattattttatcctctcatctccggtctgccggatggcgctgacgcttatccgacctacaaaatcactttttcttcaccggacgctgccagccttgcttatgcacctgcggcacgcggcttaataccagttcattgtcggctacattacgggtgacggtagtccctgcggcgatggtggcccctttaccaacagtaaccggcgccaccagttgggtatcggagccgacaaacacatcgtcgccaataaccgttttgaatttgttcgcgccatcatagttacaggtgatggtccccgcgccgatattcacgttgtcgccaatttccgcatctcccaggtaggtcagatggccggctttagaacctttaccgagacgcgcttttttcatttcaacgaaattgccgacgtgagcgcccgctaacagctccgcgccgggacgcaggcgagcaaacgggccgatggtgcaggccgcttccagatgcgcatcttccaccacgctgtatgggctaatttcgcagtcatcgccaataacgctgtttttaataatgcagcccgcgccgatcttcacgcggtgaccgagcgttacataaccttcgatgataacgttagcgtcaatttcgacatccattccacaatgaagggtgccgcggagatcaaaacgtgccggatcgcgcaacataacaccggataacagcagtttctccgcctgttcggcctggtaaatacgctccagacgagaaagctgtagacggttattcacgccgtccgtttcgctgatgcgagccggatgcaccgcggcgatctcccgtccttcctgataagccagcgcgatgatatctgtgatgtaatattcaccctgcgcattattgttagtcagcttagacaaccagcgtttcaggtccgcgccgttggcgatcagaataccagtgttaatttcctggatctgacgctgttcatcagtggcgtctttatgttcaacgatgccggtcactttaccgttttcacgcgtaatacggccatagccgctcggatcgtccagcttcacggttaataacccaataccaccctgcggtttggcatcgcgcaggcgctgtaaggtttcaaccgaaatcagcggcacgtcgccgtaaagcattaaaatatcttcatcgtcgctaaaaaagggcgcggcctgctgcattgcgtgacctgttcccaactgttccgcctgaagcacccagttcagcttgtcatctttcagggtctgttttaacaactcgccaccgtggccatagaccagatgaacctgtgcggcccctaatttagtagctgcatcaatgacatgctgcaccatgggtttacccgccagcgtgtgcagcactttaggaatatcggaatacatgcgtgtgcctttacctgcggcaaggatcactacgctcatagcactatttaacatacgcgtcctgactgtaatttgagaacgaatttatactgtttcacgttgaaaatactacatttttttcatcgtaaaatggaagaaggataaaacgctcaccgggataaaatccccgcctgctaatgaatcattttcgttcattaccgcgcctcttgtctcctgaaaagtaaaaacacccgcgtattggcaacgtagtccgatgtttttgctgtttttttactccataaataaagaagataacgtaataaagcgcaggggggtcagaaaagcaaaaaccagcgacagaggccgctggttttccgttgcgcatattttttacttaattacgcgacataaaaatccgcaaaatataccagaacatggtcgcgatagaagcaaacagatgtaatgccgcgccagctgggcgatcggtagggtaatggtgaataatgttagaagtatcgtaaagtataaacccggcgcacagcagtaccattagcgcagaaaaccagacgcccagcgagaagccgcagatgacgctggcaataatcgcgccaaaagcaatgaacccagccatagtcagaaacgagcgcagaaaagaaaagtctttttttatggaaaaagcggtaaacgtcagaccgccaaccagcaacagagtcgttattgccgccgcgccaatgctcgacgggttaatatacgccgccaccgttaacaggggggcaaaaatcagggattctgccaacacataaatccccagcccgataagttgcgtttgattagtccccgcattatccgccagacgggttgccagcattcccaccagcataaaagcgccgagaacaaccaaccagctatatcttccaccagccagcagcacatcaagcgcatactccccgacccctataaaactccacgccgcgctcaatacgataaaaccgacgatggcgacggcgagatgaagataagcgcgacgaataaaggtagtacgatcaatccttgagtcgggttgtggacccgcaaaggatggctgaaatgacatagtaataatccctcattttatgcaataaaaacgcatccattccttccttcttcgcacaatgtgcagatgccaatgacagaaagaaagatttaatgaaaacagcgctgtcgctgaaaacgcgtcgccttcagccgcttgtttttgtcgttgctagtttatcgaataaaaattgagaggataaaaaaaaaccagtccgcaatcagactggttttatgctttcaagccggtgttacatcgcttttttggtcaactcgataacgcgcagtttagcgatcgctttggccagttccgcagacgcctgagcgtaatccacgtcaccgtgcgagctcttaatgtgctcttcggctttacgcttcgcttccagggctcgcgcttcgtcgagatcctgaccgcgaatcgcggtatccgccagaacggtcacgctgccaggctgcacttccagaatgccgccggacagatagataaactcttcatgaccgtgctgcttaacgatgcgaatcataccaggcttaatggcggtgagtagcggcgcgtgccccgggtaaatccccagttcgccttcgctacccgtaacctggattttctcgaccagaccggagaacatttgttgctccgcgctgacgacatccaggtggtaagtcattgccatatcaccctccgattaaggcgttaaagttttttggctttttccacggcttcgtcgatggaaccgaccatgtagaacgcctgctccggcaggtgatcgtattcgccttccatgatgcctttaaagccacggatggtgtctttcagggagacgtatttgcccggagaaccggtaaatacttccgccacgaagaacggctgggacaggaagcgctgaattttacgcgcgcgagctaccaccagtttatcttcttcagacagttcatccataccgaggatggcgatgatgtctttcagttcctgataacgctgcaggatggactgaacgccacgcgcggtgtcgtagtgttcctgaccaacaaccagcggatccagctgacggctggtggagtccagcgggtcaacggccgggtagatacccagggatgcgatctgacggctcagtaccacggttgcatctaagtgcgcaaaggtggtggctggagacgggtcagtcaagtcatccgccggtacgtataccgcctgtacggaggtgatagaaccggttttggtggaggtgatacgttcctgcagaacgcccatctcttccgccagagtcggctggtaacctactgcggaaggcatacggcccagcagtgcggatacttccgtaccggccagggtgtaacgatagatgttatcgacgaacagcagtacgtcacgaccttcgtcacggaatttctccgccatggtcaggccggtcagtgcaacgcgcagacggtttcccggcggctcgttcatctggccatacaccagggatactttatcgataacgttggagtcggtcatttcgtggtagaagtcgttaccctcacgagtacgttcccctacgcccgcaaacactgagtaaccggagtgctcgatcgcgatgttacgaataagctccatcatgtttacggttttacctacacccgcaccaccgaacagaccgactttaccgcccttcgcgaacggacacatcaggtcgataactttgataccggtttccagcagttcctgagagtttgacaactcttcgtaggaaggtgctgcgcggtgaatcgcccaacgctcttcttcgccgatctcgcctttcatgtcgaccggttcgcccaggacgttcatgatacgacccagcgtggctttacctaccgggacttcgatcgggtgttcgagatcttttacatccagaccgcgacgcagaccgtcagaagaccccatcgcgatggtacgcacgataccgccgccaagctgctgctgaacttccagcaccagcttctcattaccattctgcacctcaagggcatcgtacacgcgtggtacggcatcctgagggaactcgacgtcgaccacggcgccgattacctggacaatctttccagtagccatcttaaatcctctacgaaataacctggttaaaccgcggcggcccccgagacgatctcggtgagttcctgagtaatgctggcctgacgagctttgttgtataccaactgcagctctttaatcaggctgccgccattatcggttgcggctttcatcgccaccattcgtgcggcctgctcgctggccaggttttctaccacgccctgataaacctgagactccacataacgacgcaggagagtatccagcagcgctttcgggtctggttcatacaggtaatcccaggctttacgcttcagatcatcatcttctgacgccggcagcggcagcagttgagtgatcgtcggcacctgagacatggtgttaataaatttgttgctgacaatgtaaagcttgtccagacggccttcgtcgtaggcctgcaacatcactttaaccggaccgatcagttcggacagagaagggttatcccccatacctgtcacctgagcgacaacgttgccgcctacggaattaaagaatgacacgcccttagagccgatcattgcgagttcgcactgaacgcctttatcggaccatgccttcatatccgccagcagctttttgaacaggttaatgttcaagccaccgcacaaaccacggtcggtcgacactaccaggtagcccacgcgtttaacgtcgcgctcttccaggtaggggtgcttatattccagattaccgttcgcaaggtgaccaatcactttgcgcatggtctctgcataaggacggctggccgccatgcgatcctgcgatttacgcattttggaagcggcgaccatctccatcgctttagtgatcttttgcgtgttctggacgcttgcgatcttactacgtatctcttttgcgccggccatgagcttctcctcaatgccttacggcctgccctaaggcaagccgccagacgttaccaggactgggttgctttgaaggaatcgaggatgcctttcagcttgccttcgatttcgtcgttatagccaccggactggttgatctcttgcatcagcggagcgtgatcacggtcgacgtaagccagcagtgcggcttcgaagctaccgattttcgccagttcgacatccgccagataaccacgttctgctgcgaacagaaccagagactgctgcgcgacggacatcggcgcatactgtttctgtttcagcagttcggtcactttctgaccgtggtcaagctgtttacgggtggcatcgtcaaggtcggatgcaaactgagagaacgccgccagttcacgatactgcgccagcgcggtacgaataccaccggacagttttttcatgatcttggtctgggctgcgccacctacacgggataccgagatacccgggttaaccgcaggacgaataccggcgttaaacaggttagattctaggaagatctgaccatcggtaatggaaattacgttggtcggaacgaacgcggaaacgtcacctgcctgcgtttcgataatcggcagcgcggtcagagagccggttttccctttcacttcacctttggtgaaggcttcgacgtagtcggcgttaacacgcgcagcacgctccagcagacgagagtggaggtagaatacgtcgcccgggaatgcttcacgtcctggcggacgacggagcagcagggagatctgacggtaagcaacagcctgtttagacaggtcatcgtaaatgatcagcgcatcttcaccgcggtcacggaagtattcgcccattgcgcaaccggcatacggcgccagatattgcagagcagcggattcggacgcggtcgccaccacaacgatggtgttagccagcgcgccgtgttcttccagtttacgcaccacgttagagatggtggacgctttctggccgatagcgacatagatacatttgataccggaatcgcgctggttgatgatggcgtcgatagccagcgcggttttaccggtctgacggtcaccgatgatcagttcacgctgaccacgaccgattgggatcatggagtcaacggctttatagccggtctgcaccggctgatcgacagactgacgatcgataacgcccggcgcaatcgcttcaacggcagagaagccgtcattatcaaccggacctttaccgtcaattggcgcacccagggtgttcaccacacgtcccagcagaccgcggccaaccggaacttccaggatacgacccgtacatttaaccttcatgccttcggcaaggtcagcgtatggacccatgactaccgcacccacggagtcgcgctccaggttcagtgcgatagcgtaacggttacccggcagggagatcatttcaccctgcatacaatcggccaggccgtgaatgcggataacaccgtcactgacagaaacaatagtaccttcgttgtgagcttcgctcaccacattgaactgagcaatgcgctgcttgatcagttcgctgatttcggtggaattcagttgcatgctccagtccccttaagactgcaagacgtctgcaaggcgctcaagacggccgcgtacgctgccatcaatgaccatatcacccgcccggatgataacgcctgccattacagacttatcgattttgcaattcagcttcactttgcgtgacagacgtttttccatcgcggcgctgattttcgaaagctgctcttcactcaatgcggttgccgacgtaacttctacctcggaggtagcttcactggcggcacgcagatgaataaactgctccagaacatccgggagcgcgttcagacgattattttcagccatcacccgaatcaggttctgaccgttttcgtctaactgctcaccgcagactgcgataaacgactcagcgagcgtttccggcgccagcgcgccagagagaagctctgccatttgttcgttcttggttacctcggcggcaaacgccagcatatcctgccagcgctctacactttggtgttcaacggcaaagtcaaaagctgctttggcgtaggggcgagctaccgtaacaaattcagacatcagcccctccctccttacagttcagcgacaagtttatccacgatgtcgctgttagcagcttcatccacggaacgttcgatgatcttctcggcgccagcaacagccaggatagcaacttgcttacgcagctcttcacgggcgcgtttacgctcggcttcaatttccgcctgcgcctgcgccacgattttagtacgttcctgctctgcttcagttttggcttcgtccaggatctgagcgcggcgtttgtttgcctgctcgatgattacctgagcttccgctttcgcttttttcagctggtcggtcgcgctggcctttgcaaggtcaagatccttatgtgctcgttcagcagaagcgagaccgtcagcaatttctttctgacgtttctcgatggctgccattaacggcggccatacgtacttcatgcaaaaccagacaaagagaataaacgcgatggcctggccgaggattgttgcgttaagattcacagcacaatgcctctatctagttaaccttctgatattgctcttaattcaagcaacgcttactacgcgacagcgaacatcacgtacagacccagacctacagcgatcatcgggatagcatccaccagacccataacgataaagaactgagtacgcagcagaggaatcagatcaggttgacgcgccgcgccttccaggaatttacccccgaggatgccgataccgatcgcagcaccgattgccgccagacccatcatcacagcggcagccatgtacagcagatccatattcaggttttccatgacagtctccagtttgtttcagttaaaacgtagtagtgttggtaaattaatgctcttcggacgccatcgacagatagacaatcgtcagaaccatgaaaatgaaggcttgcagcgtaataatcaggatgtggaaaatggcccacggcacattcagaatccactgtgaccaccacggcaacagaccagcaatcagaatgaaaatcagctcaccggcatacatgttgccgaacagtcgcagacccagagaaaccggtttggacagcagacttaccccttcaaggattaagttgacaggaatgaacgcccagtgattgaacggctgcaacgtcaactcttttgcgaagccgccgatgcctttcattttgatgctgtagaacagaataaggatgaatacgcccagcgccatcgacagggtgatgttcacgtcagcagacggcaccacgcgcgttgccggcagacccagccaatgctcagcgatatacggcagcaggtcgataggcagtaagtccatcaggttcataaggaatacccagacgaaaatcgtcagggccagcggcgcaatcagcttgcttttgccatggtacatgtctttcacgctgccatgcacaaagccgactatcagctcaatcgcggtctgaaacttgcctggcacgccgctggtcgcttttttagcaacgctacggaacatcaccagaaacaacagacccagcaccaccgagaagaacatggagtcaatattgagcgtccagaaggtggctggggggttctgcggatccaccagcgagaaagtacgcaggtccaactgaaggttattcagatggtgtcctatgtattcctgcggcgtcatattttctgaagccatgatgccttttaccctttgttgttaattacagccggcgccagtatctgaaccaccagcaccaaaacccacgtaacgatcagcggcaaaaacaccgcctttaaaaccgccaacgccaccaccagtaaaaccagcatcgctaacaccttgaaggcttcaccgaaggcgaaagtccaggacacgcggcccttagcaggtgtatgcgcctggtgacgccaggcaaatatcataaacaacatattaggcagtgccactgccaatcccccacatactgcggagatgccccagaaggggtctttgaggcaaaacagcaatccacttgctattaccgccagaaactgaatgaacagaagcttacgagcaacgtttcgactcacgagcgacacagacatcacgtttttactcctgctcacttcgaggtatgccgcgtgtcgtataaaacgttctttaagacttagagtcaagcatcaaaaagcggtcaaattatacggtgcgcccccgtgatttcaaacaataagtagccaaaaggtgaataaatgtttaaatatttttctctggcccgcatttttaacttttagccaaagtgtgaacgatcgtacaaaactgcaaatagcgcgaaaacactggcgataaagcgtgcaccagatcacacattaaacatattcatgcttacgcaattcatttacgtgtcaattcatgccttttcatctttttgatatttaagcgtaaaaccaggtactgttttaaaaataccagcttacaccttaaaaacgccccattgacatttataataaaaatttaacaagcaaaagtgatttttcgattcgatttttagcagactgatatttacaaagttgattactctctgttttaacaaaataagcgacgttgtcatgttgaaacgaaaccgtaaatccagagttaaatgtaacaacgctgaaatgcgttatacctgtcgatttttaacacaagccgcgtcgttttttttctattttttttgataaaaattaaactttgtttgacttaataatcaccagatgccgctcgccttccagttgcggaacgcgtaatttttcaacagattcgacgctaaaattgtcaggtagtgaggcaatttcatcccctggcaattgcccttttaaggcataaaaacgccctttctctcccggcagatggtgacaccagctcaccatatcattcaacgatgcgaaagcgcggctgataacgccatcaaacggcggttcggagggataggcttcaacgcggctttgaaccggcgtgatgttttccagtttcagttcgtgctggacctgacgcagaaaacgtacccgcttgcccaggctgtcgagtaaggtgaaatgcgcgtcagggagaacaatagccagcgggatgcccggcagccccggtcctgttcctacgtcgataaaacgctgtccctgaagatacggcgcaacgactatgctgtcgagaatatggcgtaccaacatttcgttgggatcccgcactgacgtcaggttgtatgctttgttccatttgtgcagcatatcaacgtaggcgaccagcagcgttttctggtgatcggtaagagaaataccggcatcagccagcagacgagagagtttgttgagcacggtcattacctgttaataatcaaatgcccgatgcgctttcgcttatcgggcctacaaatttgtagggcgggcaagcgaagcgcccccgccaaattagtgttatcaagcgctacgacgcagcataccttgttttttcagccataccagcagaatggagattgccgctggcgtaacgccggagatacgcgatgcctggccgatagacgccggtttatgatcgttcagcttggcgataacttcgttcgacagaccggaaacctgacgataatccagcgtggcaggcagcaacgtattctcgttacgtagttgtttttcaatctcatcctgctggcgagcgatatagccttcgtatttgacctggatttccacttgctcagcggcttgctcatcttcaagcgcaggcgcgaatgcggcaagcgaagtgagctgcgcgtaggtcatttccggacgacgcaacagatcttcgccgctggcctcacgggagagaggcgtggtcaaatgcgcattcacttcatcggcggattccgcagacggcgttacccatgtcgatttcagccgctgacgttcgcgttcgatactttccagcttctcgttgaagcgcgcccagcgttcatcatccaccagacccagctcgcggcccatttcggtcagacgcagatcggcgttgtcctcacgcagcatcaggcgatattcggcgcgggaggtaaacatgcgatacggctctttggtgcccagcgtacagagatcgtccaccagcacgccgagataagcctgagaacgcgcaggcgcccagccctctttgtcggcggaaagacgcgcggcattcagaccagcgagcaagccctgcgccgcagcctcttcatagccggtagtaccgttgatttgaccagcaaagaacaggccgtgaataaatttactttccagagtcggtttcagatcgcgcgggtcgaagaaatcgtactcaatcgcataaccaggacgaacgatcttcgcgttctccatgccctgcatggaacggacaatctgcatctgcacgtcaaacggcaggctggtggagataccgttagggtaaatctcgttagaggtcagtccttccggctcaaggaagatctgatgctggttacgatcggcaaaacgcatcaccttgtcttcgatcgaaggacagtagcgcgggccgatcccttcgatcacgccagcgtacattgggctacgatcgaggttattacgaatcacgtcatgggttttctcattggtatgcgtgatgtaacacggcacctgttgcggatgctgagaagcattccccataaacgagaaaaccggcatcgggttatcgccatgctgttgagccaacacgctgaaatcgatagtacgcgcatcaatacgcggcggtgtgccggttttcaggcggctgacgcgtagcggaagctcacgcagacggcgagacagcgggatggatggcggatcgccagcacgaccgccgctgtagttatccagaccaatatgaattttgccatccaggaaggttccgacggtcagtaccaccgctttcgcgcggaatttgagccccatttgggtcacggcgccgacaacgcgatcgttttcgacaatcagatcttcaaccgcttgctggaagatcatcagattcggctgattctccagcgcggtacgcaccgcctggcggtataagactcgatccgcctgagcccgggtagcgcgaacggccggacctttgctggcgtttagtatcctaaactgaatacctgcctgatcgatcgctttcgccatcagaccgccgagcgcatccacctcttttaccagatgtccctttccaataccgccgatcgccgggttgcagctcatctgtcccaacgtgtcaatattgtgtgtcaaaagcagagtctgttgacccatacgcgctgcggccatcgcggcctcagtgcctgcatgacccccgccaataataatgacgtcaaaaggatcctgataaaacatggtaattgcctcgcataacgcggtgtgaaaatggattgaagcccgggcggtggattctactcaactttagccgatggagaaagccccgggatccgggctattaaaaagaagatctttttatttagagatctgttctattgtgatctcttattaggatcgcgccaggctgtggataacccggatcctgtaataaagatcaatgcgttggaaaggatcactagctgtgaatgatcggtgatcgtggcccgtataagctgggatcaaaacgggtacttatacacaactcaaaaagtgaacaacggttattctttggataactaccggttgatccaagctttccaccagatttatccacaatggatcgcacgatctttacacttatttgagtaaattaatccaggatccgagccaaatctccgctggatcttccggaatctcatgttcaaggatgttgatcttcagtgtttccccaacctgttttgcgccagcgtctttcagttccgcttctattttctcaatcgcgccgcaaaacgtgtcgtattctcgactaccaatgccaattgcgccgaaacgtaccgcggaaagatcgggtttctgcgtctgaaggtcttcatagaaaggggtcaggttgtccggaatgtctccggcgccgtgcgttgagctgattatcagccagatcccggaagctgacagatcctctaataacggaccgtgcaccgtttcggttgaaaaaccggcagcttccagcttttccgccagatgttccgcgacgtattcggcgccgcccagggtgctgccgctgataagagtaatgtctgccattgatcgctcgctcaggtaaagaggctgcattgtactctgtgaacgagctgggatctacctgtggaaaaatgtgggattaaaaaagccgatcatggcttgatggtgcgcatgatcgggttctgcaagacgatcagtgtctcagtggactgaatttcatcaattgtttggatcttgttgataagtacgtgctgaagcgcgtcgattgatttgcacatcacttttataaagatgctgtagtgaccggtggtgtaatacgcttccgtcacctcatccaggctttccagccgggccagtgcggagggatagtctttggcgcttttgagaatgatgccaataaagcagcccacatcgtagcccagctgtttagggctgacgtcaatccgtgcgcccgtaatgatcccggcctgcttcattttctcgacgcgaacgtgaatggttccagggctaacgccaaattgtttggccagttcggcgtaggcggtgcgggcattttccattaaggcgtcaagtatgccgcggtccagattgtcgatctgataattttccatcgctttttcttatgctgattaatgattatctctattttagccattatttttaacgaatcaaaatcgaagttggctttttatctgttgattattgaatagtgctctcgttttgttgcttaatcataggcaacaggacgcaggagtaaaaaaatgaaaaccgcttacattgccaaacaacgtcaaattagcttcgtgaaatcacatttctctcgccagcttgaggagcgtctgggtctgattgaggtccaggcgccgatcctgagtcgcgtaggagatggtacgcaggataatttgtccggctgtgaaaaagcggtgcaggtaaaagtgaaagcgttgcctgacgcccagttcgaagtggtgcattcactggcgaagtggaaacgtcaaaccctggggcaacatgacttcagcgcgggcgaagggctgtacacgcacatgaaagcccttcgccccgatgaagaccgactctctccgctccactcggtctatgtggatcagtgggactgggagcgtgtcatgggcgatggcgagcgccaattttccaccctgaaaagcacagtagaggctatatgggctggaattaaggcgacggaagcagaagtgcataaacagtttggtctggcgccgttcctgccagagcaaattcagtttgttcacagccaggagctgttgtctcgctatccggatctggatgcgaaagggcgcgaacgcgcgatcgccaaagaacttggcgccgtttttctggtggggatcggcggtaaactgagcgatggccaccgccatgatgtacgcgcgccggattatgatgactggagctccgcatctgagctgggctacgccggtctgaacggcgatatcctggtgtggaacccggtgctggaagatgcgtttgagctttcctctatgggtattcgcgtagatgccgatacgctgatgcgccagctggcgttgaccggtgatgaagatcgtctgcaactggagtggcatcaggcgctgctgcgcggcgaaatgccgcagaccatcggcggcgggattgggcagtcgcgtctgacgatgttgctgctgcaattgccgcatattggtcaggtacagtgcggcgtatggcccgcgcaggttcgcgaaagcattcctgctattttataagccgttagcgccgccagcgtctcagcaggcggcttcgcatcccggtgtcaaagcgccagatatgatcgaaaatgcgcatgatgccgggtttgccgtgcgccgacatcgccaccgcatggaatcgatgctggtgaagacgctgcaactctcccactttgctcaccacgtcatccggcaagcgctgggcgataaaatccgaaatgaccaccgcatcggcatcaaaccattcccgtccctgcattctttcaataatggcgcgaaaacagctggcgatatccgtgccgccgcgaaaacgttgacttaaaaagcggatagcctgctcgataccttccgggccggagagttcataacgcacaacgtcagtggaaaacagcataataaagcagcggcggttatccgccagcgcaacgcgcatcaacgccaggcagaacgcttttgcgcactgctcgttaaatcctcccatcgagcctgaagtatcgacgcagacaataaacggtccgcgcggctgctcgtcgacatcctggtgtactaccggccgttcggtcactttctcacgccacgcttcgccatgcaggcgataggtgaggagctgtttttccactaaccggcggtaaaattcatattccagctcggtgatgccgagcgtcgccagctctggcggcaacaggcgcagaatatcatcgccttgctgtataccgtcaacctgctccggcaccgttgcgggttcgcgtaccagtgtacgaaaggtttccatcggcgcgtcttttttcggtaccgatttggcttcccgcgaacgtcccagttgttccgccagttgcattagctccggctgggcggcgagaaattcgccgtattttacgatcagttgataatcaccacgtttaagctggcccgcgctcatatcccacaggcggcctgcggcattatcattttccgccagcgtcggttccagttgcccgctcagcgtcatccgttcctgaacgtcactcagcaactgctcgcgctcttcttccagtagttgctgatttaacgtggtggcctgcacgaccagacttaaccgccagcgttgcaaaaaaagcgtgtgtagcgcaggggtaaaggtactgttgctctccgtcaactgcttcgcctgcgcggcatacggtgaatgcaggcggtgaagcaacgccagtatttgcggcagttgcacgatgaactgtggggtagagagaagttggctttgctgataacacatgacctcttccgtgagttccggcggaacgcgtgcgtctttaagacggctgcgtagcgcttcccgccagcgcgggagatcggcggtcacggcgttttttaaacgcggaaacttttcaaagaaaatgaccagttgtggggaagccagtagcgcgaggatcatctcttcgaccattccctcttcgctgacggccagcatggtatttagcgtatccagcgtcagcattgttgcgcctggcggatctgttctcctacatcctgcaggctggcctcaatgcgccctaaccagtcgctgtgaataaacaggcaatgttgctgctcgctgaagcgagtatgctgctggcgccagtcgttttctaacgtttccagctgctgtttgatctccgcaggcatactgtcttcagccgctcccggtaacgccagacgggtaccttgtagactgatgtcgcgcaccaccagatgttgagcgttatcgacttccatattcagcgtttgggcaaagccgatcccgttcagtttgccgcggatctcgccgcctttggtcagccaaagttccagcgcgctgcggtcaaaggtaatatggatcacttccatatcatgcagttttagcggtttttgtagcaataacgtcaacgttgacgcactggcttccggcggtaaagtgtaatgcgggcggcggctgaacataccgccttctttaatgacggtgaaggcggttttatcgctttgctgttgctgcaactggaggcggcgctggacaataccgccgaggcgagtcagcatggcctgctgctgccaggcgtgtccggtcatcaatatttccagttgctgttgcatgagattcagactctgcgcgtcataccacaagcaatcttttagcaggataaggtcaatcggcgcaaccgcgtcacgtccgctaaagaaggcgctggcctgtaacaggcggatggctttcttccagcgacggtcggagacataaggcgcattcggcaaattatccagctgttggcgcagagtaaatatcagctcaaagaccggatcaggcagtgaaatcgcgccgatatctttttgccactgttgatattcttcgtcgcttacctgtaacgaggcggggaccgggttatcactctcatcctgctgactaaccagcatggagcggaaattggctttatcctgaactttatccagccacagacgaatcaacattcggtcgtacaaggcttccaggctgctgtccgcttcgggcagttcgttagaggccgccaccagcagccgcatcggaattttttcctcaaatgcgccgttgcggaaatggcgttcgttaatggcggtcagcaatgtgttcaggatagcgggcccggctttccagatttcatccagaaaaacgatttcggcttcgggaaggtagccggtcgttaagcgttcatagcgaccttcatctttcagcgcctgaatagagagcgggccaaaaacctcttccggcgtggaaaagcgtgtcatcagatattcaaaagcgcgggcgcgctggaaagcaaacttcaggcggcgggcaatcagactcttggcgataccgggcgggcccaacaaaaagacgctctcaccgcttaacgccgccagtaggcaaaggcgtatggcatgactacgttcatacagtcccttctcaagggcgctgctcagacgggaaattctttccgctaataaatgtgggtgagccataataaagaggcgtcctttcgacaaatggatcatgctaattgcgagtatagacgtttcaccaccggggctgtaatcgtctgacgcgctgtttatttttctttgagccaggttaatctggcttcatttaggggtacgattttatgattaatcgtgcatactgtgcgcttttttgtgggccaagggactaagcacacatttcatatctatacactcattcattcaaactacatcaaggcggcaaaggagtgaatcccctggcactgacttaaacgtgtgactggggtaagcgaatgcagccgacaaggaggtagcgtgaagggtgacgtgtataaacgaaagatgagtctatgagcactgataataagcaatcgttgcctgcgattaccctcgcagctattggggttgtctacggtgatattggtaccagcccgctttatacgcttcgtgaatgtttgtccggtcagtttggttttggcgttgaacgagatgccgtgtttggttttctgtcgctgatcttctggctactcatctttgtggtttccatcaaatatctcaccttcgtgatgcgcgccgataacgcgggtgaaggtggaattttgacgctgatgtcgcttgccgggcgtaatacctcggcgcgcaccacatccatgttagttatcatgggactgataggcggcagctttttctatggcgaagtggtcattacgccggcgatttcggtgatgtcggcgattgaaggcctggagattgtcgcgccgcagctggacacctggattgtcccgctctccattattgtgctgactctgttgtttatgattcagaagcacggtacgggaatggtagggaaactctttgcgccgatcatgctgacctggtttttaatcctggcggtacttggcctgcgcagtattatcgccaatcccgaagtgttacatgcgctgaatcctgtctgggcggtacgttttttccttgaatataaaaccgtatcatttattgcgttgggcgcggtggtgctgtcgattaccggcgtagaggcgttgtacgccgatatgggacacttcggtaagttcccgattcgcctggcgtggtttaccgtggtattgccgtcgttagtactgaactactttggtcagggcgcattgctacttaagcatccggaagcgattaaaaaccccttcttcctgttggcgccggactgggcgttaattccgctgctgattctggccgcgctggcgacggtgatcgcctcccaggcggtcatttccggcgtcttttcgctgacgcgtcaggccgtgcgtcttggctatttgtcgccaatgcgcattatccatacctccgagatggagtccggtcagatctatatccctttcgttaactggctgctttatttcgcggtcgtggttgttattgttagctttgagcactccagcaacctggcggcggcctatggtatcgccgtgaccggcacgatggtgctgacgtctattctttctacgaccgtggcgcgtaagaactggcactggaacaaatattttgtcgcgctgatcctcatcgcattcctgtgcgtggatatcccgctgttctcggctaacctcgataaattgttgtccggcggttggctgccgctgagcctgggtctgatcatgttcacgatcatgaccacctggaagagcgagcgtttccgtctgttgcgtcgtatgcatgaacacggtaattcgctggaagcgatgattgcttcgctggagaagtcaccgccggttcgggtgccgggtactgccgtatacatgtcgcgcgcgctcagtgtgatcccttttgctttattgcataacctgaagcacaacaaagtgttgcatgagcgcgtaatcttactgacgttgcgtacagaagatgcgccatatgtgcataacgttcgccgggtgcagattgagcagttgtctccgacattctggcgcgtggtggctagctacggctggcgcgaaacgccaaacgttgaagaggtgttccaccgctgcggtctggaagggcttagctgtcggatgatggaaacgtcgttctttatgtcgcacgagtcgttgattgtcggcaaacgcccgtggtatttgcgtctgcgtggcaagctgtatttgttgttgcaacgcaacgccctgcgcgcgccggatcagttcgagatcccgcctaaccgcgtgattgagttaggtacgcaggtcgagatttaacctcccatcaacatgccgggggccgcgttggcttacccggcctgaccaatccgtagattcccacaagataatcgcctgatggcgattatcttcacctgatttccgctagcgaaacgtttcgacggcgatcacaattctgttacgtcatgatggttttatgaacacatccagggttacactgcggccagcgaaacgtttcgctagtggagcagaaaaatgaagaaaggcaccgtactcaactctgaaatctcgtcggtcatttcccgtctggggcatactgatactctggtggtctgtgatgcgggtttacccatcccgaatagcaccgcgcgtatcgatatggcactaacccagggcgtaccttcttttatgcaggtggtggatgtcgtgacccgggaaatgcaggttgaggcggcgattcttgcaacggaaatcaaacaacagaatccgcagctccacgaaacgttgctcactcaccttgagcaactgcagcaacaccagggaaacaccataaaaattagttatacgacacacgaacaattcaaaaaattgactgcagacagtcaggcggtgattcgcagcggggagtgttccccgtatgcgaacgtcattctttgcgctggcgttacgttctgaggccgctatggacgcattactgcaactcaaagggatcgataaagcgttccccggcgtgaaggctctctccggcgccgcgttaaacgtttatcctggccgcgttatggcgctggtgggggaaaacggcgccggaaaatccaccatgatgaaagtattaaccggcatctatacgcgagatgcgggatcgttgttatggctgggtaaagagaccacctttaatgggcctaaatcgtctcaggaagccgggatcggcattattcatcaggaactgaacctgattccgcagttgaccattgcggaaaacatcttcctgggccgtgagtttgtgaatcgctttggcaaaatcgactggaaaaagatgtatgccgaagccgaccacctcttagccaaactcaatctgcgttttaagagcgataagctggtgggcgaactctctatcggcgatcagcaaatggtggaaatcgccaaagtgctgagcttcgaatccaaagtcatcattatggatgaaccgaccgatgcgctgaccgacactgaaaccgactctctgttccgcgttatccgcgaattaaaatcgcaggggcgcggcattgtctatatctcccaccgtatgaaagagatcttcgaaatttgcgatgacgtgacggtcttccgcgatgggcaatttatcgccgagcgtgaagtggccacgttgaccgaagattctcttatcgaaatgatggtgggacgtaagttggaagatcagtacccgcatctggataacgcgccgggtgagattcgcctgaaggtcgataatctgtgcggaccgggcgtgaatgatgtctcttttgtgctgcgaaaaggcgagatccttggcatctccggcctgatgggcgccggtcgcaccgagctgatgaaagtattgtacggcgcgatgccgcgaaccagcggttacgtgacgcttgatggacacgaagtggtgacgcgttctccgcaggacggactggccaatggcatcgtttatatctctgaagaccgtaagcgcgatggactggtgctcggcatgtcagttaaagagaatatgtcgctgacggcgctggactatttcagccgcgctggcggaagcctgaaacacaaagatgagcagcaggcggtgggggattttatccgtctgttcaacgtcaagacgccgtcaatggaacaggcgataggcctgctttctggcggtaatcagcaaaaagtggcgattgcccgcgggttgatgacgcgcccgaaagtgctcattctcgacgagccgacccgcggcgtggacgtcggcgccaagaaagagatttatcagcttatcaaccagtttaaggccgacggcctgagcatcattctggtctcatctgagatgccagaagtattaggcatgagcgatcgcatcatcgtcatgcatgaagggcatctcagcggtgaatttactcgcgagcaggccacccaggaagtgttaatggctgccgcagtgggcaagcttaatcgcgtgaatcaggagtaaaaaagatgacaacccaggctgtttctggtcgccgttatttcactaaagcgtggcttcttgagcagaagtcgctcattgccctgctggtgttgatcgcgattgtttcgacgttgagccccaacttttttaccgttaataatctgttcaatattcttcaacagacctccgtcaacgccattatggcggtggggatgacgttggtgattctgacatcggggatcgatctgtccgtcggttccctgctggcgctcaccggcgcggttgccgcttcaatcgtcggcgttgaagtgaatgcgctggtcgcggttgccgccgcgctggcgctgggcgctgcgattggcgccgtcactggcgttatcgtcgcgaaaggccgcgtacaggcgtttatcgctacgctggtgatgatgctgctactgcgcggtgtaacgatggtttacaccgacggtagcccggtcaacaccggctttaccgataacgccgatctgtttggctggttcggtatcggccgtccgctgggcgttcctacgccggtctggatcatggctatcgtctttatcgccgcctggtatatgctgcatcacacccgtctgggacgctatatctacgcgctgggcggtaacgaagcggcgacgcgcctgtctggcattagcgtgagcaaagtgaaaattatcgtctattcactttgcggcctgacagcgtcgctggcgggcatcattgaagtggcgcgcctctcttccgcgcagccgacggcgggtaccggctatgagctggatgctattgccgccgtggtgctgggcggcaccagccttgcaggcggtaaaggacgcattgttgggacattgatcggcgcattgattctcggcttccttaataatggtttgaatttgttaggtgtttcctcctattaccagatgatcgtcaaagcggtggtgattttgctggcggtactggtagacaacaaaaagcagtaacaacgactacaggacatctgaaatatgaacatgaaaaaactggctaccctggtatctgctgttgcgctgagcgccaccgtgagcgcgaatgcaatggcgaaggacaccattgcgctggtgatctctaccctcaataatcccttcttcgtgtcgttaaaagacggggcgcaaaaagaggcggataaactgggttataacctggtggtgctggactcccagaacaaccctgccaaagagctggcgaacgtgcaggatttaaccgttcgcgggaccaaaattttgctgatcaacccgactgactccgatgcggtgggtaacgcggtgaagatggctaaccaggcgaagattccggttatcacgcttgaccgccaggcaaccaaaggcgatgtcgtcagccatatcgcgtctgataacgtgctgggcggtaagatcgctggcgactatatcgcgaaaaaagctggcgaaggcgccaaagtgattgagttgcaaggcattgccggaacatctgcggcgcgtgagcgtggcgaaggtttccagcaggcggtagccgcccacaaatttaatgtcctggccagccagcctgccgatttcgaccgtactaagggtctgaacgtcatgcagaacctgctgaccgcgcatccggatgttcaggctgtcttcgcccagaacgatgaaatggcgctgggcgcactgcgcgcgctgcaaactgccggtaaagcagatgtgatggtggttggatttgacggtacgccggatggcgaaaaggccgtaaaagatggcaaactggcagcgactatcgctcagttaccggatcaaatcggcgccaaaggcgttgaagtggcggataaggtgctgaaaggcgaaaaagttcaggccaaatatccggttgacctgaaactggtcatcaagcagtaataaacgacacgggtcaactatggcctgatggcgacagaaatacgcgagcctccgctgaggtgaacgtaaaaaaagaaaagcagggcacgcgccaccctaaccggtggcgcactttgacgtggaaccccgaatatgaaaaccgcaggtaatctcatcgtccttggcagcattaatgccgatcatatccttaatcttgagtccttccctaccccgggtgaaacggtaaccggtagccattatcaggtcgcgtttggcgggaaaggcgcgaatcaggcggttgctgcgggacgtagcggggcaaatattgcgtttatcgcctgcacgggcgatgacgatattggcgacagtattcgtaaacaattagtcagcgatcgtattgatatcgcgccagttagcgttattaaaggcgagtctaccggggtggcgctgattttcgttaacggcgaaggcgagaacgtcatcggtattcatgccggagcgaatgccgcgttatcgccggcgttggttgatgcgcaacgtgaacgtatcgcgcaggcggatgcgttactgatgcagctggaatcgccgctggaaagcgtactggcggcggcgaaaatcgcccatcaacatcatactactgttgcgctgaacccggcgcctgcccgtgagctaccggatgaactgctggcgctggtggacatcatcacgccaaatgaaacggaagctgaaaagctgacgggcgtgcgtgtggaaaatgacgacgatgccgcgaaagctgcgcaggttttgcatgataaaggcattcgaaccgtattaattaccttaggaagccgtggcgtctgggccagcgtagacggcgagggccgccgcgttcctggatttagcgttgaggctgtcgataccattgccgccggagatacgtttaacggcgcctttatcaccgcgatactggaggagacgccgttgccggaagcgattcgctttgcccatgccgccgccgcgattgccgtaacgcgtaaaggcgcgcaaccttccgttccgtggcgcgaagagatagaagcgtttttacatcagcaggggtaacgcttggctactatgaaagatgttgcccgcctggcgggagtctctacatcgacggtctctcacgttattaacaaagatcgctttgtgagtgagacgattactgaaaaagttgaagcggcgattaaatcacttaactatgcgccttccgcgctggcgcgaagcctcaagttaaaccagacccgcacgattggtatgctaattaccgccagtaccaaccctttttattccgaactggtgcgcggcgttgagcgaagctgttttgagcgcggttatagtctggtgctgtgcaataccgaaggcgacgagcaacggatgaaccgcaacctggagacgctgatgcaaaaacgggtagacggtttactgctgctgtgtaccgaaacgcatcagccttctcgtgaaatcatggagcgttatccgtctattcctaccgtcatgatggactggtcgccgtttgatggtgagggcgatagcgatctcattcaggataattcgttgttaggcggtgatcttgccacccaacaccttatcgataaaggatttacccgaatagcctgtattaccggcccgctggacaaaacgccagcgcgtttgcggctggaagggtatcgggcggcgatgaaacgcgcagggctggctattccgcaaggctatgagatcaccggcgattttgaatttggcggcggctttgacgccatgcaggcgttactcgcccatcaacagcgaccgcaagcggtttttaccggaaacgatgcgatggctgtcggcgcctatcaggcgctatatcaggcggggcttcgtatcccgcaggatatggcagtcattggctatgatgatattgagctggcgcgctatatgacgccgccgctgacgactatccatcagccgaaagatgaattgggcgagctggctattgatgtgttgattcatcggatggcgcagcccgccttgcaacaacagcgacttcagcttactccggttttgacggtgcgtgggtcggtttagatttatgccgttctttaatcagattgttgccgtctttggctcttagcagcataaacatcagcgcggacacgatagtgatcgcccccatcgtgataaaggtatagtggaactgttccacggtactggtgcccgcaaaaccttcataaatacgtaacaccgccgcgctgatcgccacgcctaaactgatagacaattgctgcgtaaccgccagaacgctgttgccgctgctggcgttatcgtctgtcagatccgcaagagtaatcgtattcattgccgtaaattgagtggacatcgccattccaagaatgaatagcggcagtacgagcatccagatcggcatggcgggagattgaaacgaaaactgggcaatcatcagaccgataaataccgtaatgccgaccagagtcttccggtatcccaaacgtcgtaaaacctgcgttacggtcgatttcgcgataatagaacccaaagccgtcggcgccatcatgcagccggcgatcagagccgggtagccaaaaccaacctgtagcattaacggcatcaaaaaaggtacgcagcctgtccccagacgcgtggcgaggttgccggcaataccgacggaaaatgtgcgtgtcttaaacagcgatagtgatattaacggtgtcggatgacggcgggcgtggcggatataggccaatagtagaacgatactgcaaaaaataatggcggatgcgatccatgtcgccacaatcttttcgccaaacagttccattccgctggaaaataaaaccagacttaacccaaaaagaaagaagccggtcatgtcaaacttgcgacgcggcgtggtgaagttgggcatatatttgcgggcatacagaatgcctgcaacaccaatgggaatattaatcaggaagatccagtgccagcttgcccaggtcaccagtacgccgcctaataccggccccagaatcggacctaccagccccggcatagtgacaaagttaagaacgggcagcagctcactacgcggataggctcgcaataacgccagccgcgccactggcatcatcatcgctccgccgacgccttgtacgacgcgaaaaataaccaattcagatagtgaactggagagcgcgcaggccagcgagcctaacgtaaacagacttacggcaaccataaaaacgcgacgcgtaccaaagcggtcagccagccgcttaccggaattaacatagctactgtcagggtataactgataatagcggactgcatggcgagtggtgaacggttaagactatgcgcaatagccggtaaagcggtattcaaaatggtggcgtctagcgcctgcataaagaaggccatcgccgcgatccacggcaggccagccatactgcgcgcttttttgctggtcattcaatatcctgttaattatctggtctctcattgggcgctattaacaacgcctggcaggcctggaaagcgcgttcgccgtcgccatcagcgatggcatcaacaatggcctggtgcaaatccagctttaccacctcgttataggtgattgaggtaaagtaagtgtgataaaccgaatgaaatagcgtcgcaaaagagattagaaagggattggcgctcatttcgtagatatgctcgtgccacgccatatccacttcaatccagcgttcacgcttaaaatgctttttcagcgcgaccatctcttccattaaggcattaagccgcgctttctgctccggtgtgccaagagtcgccgccagcaggcaggcttgcggctccaggctaatacgcatcaccagaaaatgctctaccacctgatgaaaattttcttccgtcatccaccaggtcagcagctcttgatccagaaagttccagtttccctgcggcatcacccgcgtaccaatgcgcggacgaggtagcaccatacctttagccgtcaacgttttcaccgcttcgcgaactgccgttcgacttacgccgtactgctcgcccagttctatttcgccgggaagaatagtaccgggggcgtagtcaccctttaatatccgctgcgccagcttttcagccagaacataggatagatttttctgtgcggctaattgttgtgcgcttaaaggcatgaatgttcttcctttctctttcgtttggttattagtatgccacctggaagtgtgattgcagttgcaataacggcaatttgcttattttatggcacgttaagcacgctattgatgaaaaaagagacactcagaaaattattttaaatttcctcttgtcaggcagaaataactccctataatgcgccaccactgacacggaacaacggcacacaggccgccgggtcagtggggttcagaccagaacctcacggagaaaagcgaaaataatcgcttgactctgaagcgggaaagcgtaatatgcacaccccgcgccgctgagaaaaagcgaagcggcactgctctttaacaatttatcagacaatctgtgtgggcactcgaagatacggattcttaacgtcctcggacgaaaaacgaataccaagtctcaagagtgaacacgtaattcattacgaagtttaattctttgagcatcaaacttttaaattgaagagtttgatcatggctcagattgaacgctggcggcaggcctaacacatgcaagtcgaacggtaacaggaagcagcttgctgctttgctgacgagtggcggacgggtgagtaatgtctgggaaactgcctgatggagggggataactactggaaacggtggctaataccgcataacgtcgcaagaccaaagagggggaccttcgggcctcttgccatcagatgtgcccagatgggattagcttgttggtgaggtaacggctcaccaaggcgacgatccctagctggtctgagaggatgaccagccacactggaactgagacacggcccagactcctacgggaggcagcagtggggaatattgcacaatgggcgcaagcctgatgcagccatgccgcgtgtatgaagaaggccttcgggttgtaaagtactttcagcggggaggaaggtgttgtggttaataaccgcagcaattgacgttacccgcagaagaagcaccggctaactccgtgccagcagccgcggtaatacggagggtgcaagcgttaatcggaattactgggcgtaaagcgcacgcaggcggtctgtcaagtcggatgtgaaatccccgggctcaacctgggaactgcattcgaaactggcaggcttgagtcttgtagaggggggtagaattccaggtgtagcggtgaaatgcgtagagatctggaggaataccggtggcgaaggcggccccctggacaaagactgacgctcaggtgcgaaagcgtggggagcaaacaggattagataccctggtagtccacgccgtaaacgatgtctacttggaggttgtgcccttgaggcgtggcttccggagctaacgcgttaagtagaccgcctggggagtacggccgcaaggttaaaactcaaatgaattgacgggggcccgcacaagcggtggagcatgtggtttaattcgatgcaacgcgaagaaccttacctggtcttgacatccacagaagaatccagagatggatttgtgccttcgggaactgtgagacaggtgctgcatggctgtcgtcagctcgtgttgtgaaatgttgggttaagtcccgcaacgagcgcaacccttatcctttgttgccagcggttaggccgggaactcaaaggagactgccagtgataaactggaggaaggtggggatgacgtcaagtcatcatggcccttacgaccagggctacacacgtgctacaatggcgcatacaaagagaagcgacctcgcgagagcaagcggacctcataaagtgcgtcgtagtccggattggagtctgcaactcgactccatgaagtcggaatcgctagtaatcgtggatcagaatgccacggtgaatacgttcccgggccttgtacacaccgcccgtcacaccatgggagtgggttgcaaaagaagtaggtagcttaaccttcgggagggcgcttaccactttgtgattcatgactggggtgaagtcgtaacaaggtaaccgtaggggaacctgcggttggatcacctccttaccttaaagaagcgtactttgcagtgctcacacagattgtctgatgaaaagtaaatagcaaggcgtcttgcgaagcagactgatacgtccccttcgtctagaggcccaggacaccgccctttcacggcggtaacaggggttcgaatcccctaggggacgccacttgctggtttgtgagtgaaagtcacctgccttaatatctcaaaactgacttacgagtcacgtttgagatatttgctctttaaaaatctggatcaagctgaaaattgaaacacagaacaacgaaaattgttcgtgagtctctcaaattttcgcaacacgatgatgaatcgtaagaaacatcttcgggttgtgaggttaagcgactaagcgtacacggtggatgccctggcagtcagaggcgatgaagggcgtactaatctgcgataagcgccggtaaggtgatatgaaccgttataaccggcgatacccgaatggggaaacccagtgtgattcgtcacactatcattaactgaatccataggttaatgaggcgaaccgggggaactgaaacatctaagtaccccgaggaaaagaaatcaaccgagattcccccagtagcggcgagcgaacggggaggagcccagagcctgaatcagcatgtgtgttagtggaagcgtctggaaaggcgcgcgatacagggtgacagccccgtacacaaaagcgcatgtgctgtgagctcgatgagtagggcgggacacgtggtatcctgtctgaatatggggggaccatcctccaaggctaaatactcctgactgaccgatagtgaaccagtaccgtgagggaaaggcgaaaagaaccccggcgaggggagtgaaaaagaacctgaaaccgtgtacgtacaagcagtgggagcacaggtttacctgtgtgactgcgtaccttttgtataatgggtcagcgacttatattctgtagcaaggttaaccgaataggggagccggagggaaaccgagtcttaattgggcgttaagttgcagggtatagacccgaaacccggtgatctagccatgggcaggttgaaggttgggtaacactaactggaggaccgaaccgactaatgttgaaaaattagcggatgacctgtggctgggggtgaaaggccaatcaaaccgggagatagctggttctccccgaaagctatttaggtagcgcctcgtgaattcatctccgggggtagagcactgtttcggctagggggccatcccggcttaccaacccgatgcaaactgcgaataccggagaatgttatcacgggagacacacggcgggtgctaacgtccgtcgtgaagagggaaacaacccagaccgccagctaaggtcccaaagtcatggttaagtgggaaacgatgtgggaaggcccagacagccaggatgttggcttagaagcagccatcatttaaagaaagcgtaatagctcactggtcgagtcggcctgcgcggaagatgtaacggggctaaaccatgcaccgaagctgcggcagcgacgcttatgcgttgttgggtaggggagcgttctgtaagcctgcgaaggtggcctgtgagggttgctggaggtatcagaagtgcgaatgctgacataagtaacgataaagcgggtgaaaagcccgctcgccggaagaccaagggttcctgtccaacgttaatcggggcagggtgagtcgacccctaaggcgaggccgaaaggcgtagtcgatgggaaacgggttaatattcccgtacttggtgttactgcgaaggggggacggagaaggctatgttggccgggcgacggttgtcccggtttaagcgtgtaggtgtgtgttccaggtaaatccggttcactttaacactgaggcgtgacgacgaggcactacggtgctgaagcaacaaatgccctgcttccaggaaaagcctctaagcatcaggtaacatcaaatcgtaccccaaaccgacacaggtggtcaggtagagaataccaaggcgcttgagagaactcgggtgaaggaactaggcaaaatggtgccgtaacttcgggagaaggcacgctgacacgtaggtgaagtgatttactcatggagctgaagtcagtcgaagataccagctggctgcaactgtttattaaaaacacagcactgtgcaaacacgaaagtggacgtatacggtgtgacgcctgcccggtgccggaaggttaattgatggggtcagcgcaagcgaagctcctgatcgaagccccggtaaacggcggccgtaactataacggtcctaaggtagcgaaattccttgtcgggtaagttccgacctgcacgaatggcgtaatgatggccaggctgtctccacccgagactcagtgaaattgaactcgctgtgaagatgcagtgtacccgcggcaagacggaaagaccccgtgaacctttactatagcttgacactgaacattgagccttgatgtgtaggataggtgggaggctttgaagtgtggacgccagtctgcatggagccgaccttgaaataccaccctttaatgtttgatgttctaacgtggacccgttacccgggttgcggacagtgtctggtgggtagtttgactggggcggtctcctcctaaagagtaacggaggagcacgaaggttggctaatcctggtcggacatcaggaggttagtgcaatggcataagccagcttgactgcgagcgtgacggcgcgagcaggtgcgaaagcaggtcatagtgatccggtggttctgaatggaagggccatcgctcaacggataaaaggtactccggggataacaggctgataccgcccaagagttcatatcgacggcggtgtttggcacctcgatgtcggctcatcacatctggggctgaagtaggtcccaagggtatggctgttcgccatttaaagtggtacgcgagctgggtttagaacgtcgtgagacagttcggtccctatctgccgtgggcgctggagaactgaggggggctgctcctagtacgagaggaccggagtggacgcatcactggtgttcgggttgtcatgccaatggcactgcccggtagctaaatgcggaagagataagtgctgaaagcatctaagcacgaaacttgccccgagatgagttctccctgagacttaaagtctcctgaaggaacgttgaagacgacgacgttgataggccgggtgtgtaagcgcagcgatgcgttgagctaaccggtactaatgaaccgtgaggcttaaccttacaacgccgaagatgttttggcggatgagaagacgattttcagcagtgattcagagttgagtacgcaatactttgcgcagcagcaaggcggcaagcgaaggaaaggaaggagcatacagaagtatgtgactgagtttacgagcgcaggcaacgccgctgatgcgataaagaattgcgtacagagcacaaagaatttgcctggcggcactagcgcggtggtcccacctgaccccatgccgaactcagaagtgaaacgccgtagcgccgatggtagtgtggggtctccccatgcgagagtagggaactgccaggcatcaaattaagcagtaaactgatgtaaaaatcagtggttgtaaaagaattcggtggagcggtagttcagttggttagaatacctgcctgtcacgcagggggtcgcgggttcgagtcccgtccgttccgccaccctaattaggggcgtagttcaattggtagagcaccggtctccaaaaccgggtgttgggagttcgagtctctccgcccctgccagaaataatcctttgcatctgctaaggattttttttttgcctaaaattacctgattatctgatcaggtaatcgtaagttcccttctttttcttttcatcattttcattgttcatccagcacatccgtttttaacagatcgcagatcagcgagtatttatcgctgttttgcagccaaatagcgtatagtggccgtgaaagcgttgcgctgtcggcaacggtatgtaatccgcccttttcatttgcccagtttacaggaagccagctacagccatttaatgcgctaagctgctgtcgggcgagttcggctgagctggttgttaataccggcacttcatctgctgcgatcagccctgtttcatgctgttggaagtctggtccccactccagccgcagataattgagttctgatttcttacgggcagggctgctgcaatataacgccaaagtgaagtgccctaacagctgactgctgaactcatccattttgggcgcttcggtagtaatgaggagatcaagctggcgttcatgaagttgcttcacaagcgattgccgttgagcgattctggcttcgaactgcaggccgctttgcggctcctgtagttggtacagtcgccccagccaggcgttaagcatacactcccataaagacgcgctggcgccgatggaaaactcgttatggcgtgaggtatgcgccacctctttacgtgccgcctgccacgtattcatcagcgtttccgcatacggtaaaagtttttcgccagccgtggttaaacggatattgtttctgtgccgcgtaaaaaggtttacgcccagttgattctccagttgcctgatacgaaagctcaccgcggattgcgtcaggtaaagtgcttctgcggcccgcccgaaatggcgtgtccggctaacttccaggaaagtttttaacaattccgtatccactgtgctctccacaaaattatttgtcgttatgatttaaatgttttgttttacactctgtcaagcgtaactaatactccgcgccataaatagctcagacaaagaattaggagcgtgcaggatggcggaaagctttacgacgactaatcgatattttgacaataaacattatccacgtggattctctcgtcacggtgatttcacgattaaagaggcacaactgcttgagcgtcatggtcatgcctttaatgatctggatcttggcaagcgtgagcctgtgactgaagaagagaagctgtttgtagcggtatgtcgcggtgaacgcgagccggtaacggatgcagaacgcgtctggtccaagtatatgacgcgtatcaagcgtccaaaacgcttccacaccttgtctggcggcaagccgcaagttgaaggcgcagaagactacaccgaagctgatgattaataaaaagggcgtaatgccctttttttacgccagcagcttttgcaaatgaattaacaacctgtctatcgcccgatagcttaccgcctcctgcaaatgctgacgcgagatctggtcagccagttctatgtcggcaatggttctggccacttttagtaaacgctgccaggcgcgaatggataatccaagatgcaccagcgtgtcttcaagccagcgggcgtcatcgtggtgcaaaacacaatatttttggatttcgcgaccctccagacgcgcgtttaacttcttctggcgtcggtactgccgttcatgggcggcgatgacccgcttttttaccgtagcgctgctctcaccctttgaggcgtgttggctaagaatcccgggcggtggaagcggtatctcaagcgaaaggtcaaaacgatcaagaaacgggcctgacaaccgattaaggtaacgtagtgtctgttctggcgtgcagcgattatggtttccctgataatgtccggtcgggctgggattcattgcggcgattaactggaacctggcagggtacgttattttcgctctggtacgggataaatgaatttgaccggattctataggttcacgtagcgcatccagtgtgcgtcgttcaaattcaggcaattcatcaaggaacaaaattccgttgtgcgccagcgatatctctcccggggcgggtattgcgccgccgccgaccatagcagtaagtgaggcgctatgatgaggtgagcgaaagggacgttgctgccatcgtttttgtaccgtatcggcattaaccagactgaggatcgcggcgctttccaacgcctcttcattgcttaatggtggaagaatcccgctcagtcgactggccagcatggttttacccgtacccggcgggccgatcaatagcagattatgtccccctgccgctgtaatctccaggccgcgtttaccctgctcctgaccgatcacatcgcgaagatcggcagttgcggtagacgatgccatatcctgagctaaaggtctttccagggcgtgtttcccttccagaaaggcgcagacggtttgtagatgatcggcgataaaacatccttctttgctgataagcccaacctccgccgcgttctctgttgcgacgataatatttctgccggccctgatggcttccgttgcacttgatattgcgccaggaacgccgcgtaatgcgcctgtaagcgctaactcacccaccagctcatatgcctcaagattcgacgctgtaagctgctcagacgcggccagaagcgcaacagcaataggcaggtcataccttccgccctctttcggtagatcggctggagcaaggttaatggttatttttttagccggaaattcatatccgctattaataatcgcactacgtacccggtcacgcgcctcttttaccgtggtttccggtaggccaaccatggttaatcccggtaatccattactgatatgcacctctatagtgataggcggcgcattgacgccaagtgcggcgcgagtatgaacaatcgccagtgacataatccctcctgttacgtggattatgcggaatagaagagaaaatcgaattactgactttttgttttttagcggctgattcccgaattttggcgtcattttcaggtaagaaacatcaaactgggagaacgctcgcagaagcgaaaagaaggaaaacagggtgtagagtgcgccaaaagggggaggaaaacgtgaaaatttttcagttgctaatttttcttataaaaaacaaagcacttttaggcattcacctgcattatctgaaacgtggttaaaaaaatatcttgtgctattggcaaaacctatggtaactctttaggtattccttcgaacaagatgcaagaatagacaaaaatgacagcccttctacgagtgattagcctggtcgtgattagcgtggtggtgattattatcccaccgtgcggggctgcacttggacgaggaaaggcttagaaatcaagccttaacgaactaagacccccgcaccgaaaggtccgggggttttttttggcctgaaaaacttaagcgaggagcagagcgtgaataacagcataaagttctgtttctcaagatttacgacggggatgtaactatgaacggggcacagtgggtggtacatgctttgcgagcgcagggggtgaaaaccgtatttggttatcctggcggcgcaattatgccggtttacgacgcgttgtatgacggtggtgtggagcatttgttgtgccgacacgagcagggtgcggcaatggcggcaatcggttatgcccgttctaccggcaaaaccggtgtttgtatcgccacctccggccctggcgccactaacctgatcactggcctggcggatgcgttgttagattcggtccccgtcgtcgcgatcacgggtcaggtttccgccccgttcatcggcaccgatgcgttccaggaggtggatgtgttaggcctgtcgctggcctgtaccaaacacagcttcctggtgcagtcgctggcagagctgcctcgtatcatggcagaggcttttgaagttgccaacgctggccgtcctggcccggttctggtggatatcccgaaagatatccagttggccagcggtgagctggaaccctggtttactaccgttgataacgaagcgaccttcccgcaggctgatgttgaacaggtgcgccagatgctggaacaggcgaaaaaacccatgctgtacgtcggcggtggtgttggtatggcgcaggcggttccggcgctgcgtaaatttatcgcggtaacgcaaatgccagttacctgcacgctgaaagggctaggggctgttgaagctgattatccgtactatctgggcatgctgggaatgcacggtactaaagcggctaatttcgcggtgcaagagtgtgatttactgatcgcagtgggtgcacgttttgatgaccgggtgaccggtaagctgaatacgtttgcgccgaacgccagcgtaatccatatggatatcgacccggcggaaatgaacaaactgcgtcaggcacacgtcgcgttgcagggcgatttaaattcgctgttgccggcattacagcaaccgctgaagatcgacgcatggcgtcagtcctgtgcagagctgcgcgcagaacacgcctggcgctatgatcatcctggcgagactatctatgcaccgttgttgttgaagcaattgtcggaacgcaaacccgcagacagcgtggtgacgacggatgtggggcagcatcagatgtggtcagcccagcatatgacttacacccgcccggagaacttcatcacctccagcggtctggggacgatgggattcggcttaccggcggccgttggcgcgcaggtagcgcgaccgaatgataccgttatctgtatctccggtgacggctccttcatgatgaatgttcaggagttgggcaccgtaaaacgcaagcagttaccgttgaagatagtcttactcgacaaccagcggttagggatggttcgacaatggcagcaactgtttttccaggagcgatatagcgaaaccaccctgaccgataaccccgatttcctcatgctggccagcgccttcggcattccaggccagcacattactcgtaaagaccaggttgaagcggcactcgacactatgttggcaagcgaagggccgtacctgcttcacgtctcaatcgacgaacttgaaaatgtctggccgttggtgccgcctggcgccagtaactctgaaatgctggagaaattatcatgatgcaacatcaggtcaatgtatcggcacgctttaatccagaaaccttagaacgtgttttacgcgtggtgcgccatcgtggttttcaggtgtgctccatgaatatggaagccgcgaccgatgcgcagaatataaatattgaattgaccgttgccagtccccggtcggtcgacttactgtttagtcagttaagtaaactggtagatgttgcgcatgtcgcgatctgccagagcgctgccacatcacaacaaatccgcgcctgagcgcaaaaggaagaaaaatgacgacgaaaaaagctgattatatttggttcaatggcgagatggtgcgctgggaagacgcgaaggttcacgtaatgtctcacgcgctgcactacggtacgtcggtatttgaagggattcggtgctacgactctcacaaaggcccggtagtgtttcgtcatcgtgaacatatgcagcgcctgcgcgactcagcaaaaatttatcgttttccggtttcccagagtattgatgagctgatggaagcctgccgcgaagtgatccgcaaaaacaacctgaccagcgcctatatccgtccgttggtatttgtcggcgatgtcggtatgggcgttaacccgcccccgggatacaccactgacgtcatcatcgccgcgttcccgtggggggcatacctgggtgccgaagcgctggatcaggggatcgatgcgatggtttcttcctggaatcgcgctgcgccgaacaccattccaaccgccgccaaagcgggcgggaactatctttcctcactgctggtgggtagcgaagcgcgccgccacggctatcaggaaggcatcgccctggatgtaaacggctatatctccgaaggcgcaggtgaaaacctgtttgaggtaaaagatggtgtgctgtttactccgccgtttacctcttccgcgctgccaggcattactcgcgatgcgatcatcaaactggcgaaagagctgggtattgaagtgcgcgagcaggtgctgtcccgtgagtcgctgtatctggccgacgaagtgtttatgtccggaaccgcggcagaaattactccggtacgcagcgttgatggtatccaggtaggcgaaggccgctgcggtcctgtcaccaagcgtatccaacaagccttctttggtctcttcactggagaaaccgaggataaatggggctggttggatccggtaaattcataataaataaaattaatattttcccaaaataatttgcgtcacaggaaggcggtaacgcagcgaatccccagggcttactgtagtaagtgactggggtgagtgaggcagccaacgcacctgtggcgtgaagtatgaagggaaaagatggggagtaaataaagcatgcctaagtaccgttccgccaccaccacccatggtcgtaatatggcgggtgcccgcgcgctgtggcgcgccaccggaatgaccgacagtgattttggcaaaccgattatcgccgtggtgaactcattcactcagtttgtgccgggtcacgttcatctgcgcgatctcggtaagctggtcgccgaacagattgaagcttccggcggggtggcgaaagagttcaacactattgccgtggatgacgggattgccatggggcacgggggtatgctctattcactgccgtcgcgcgagctgatcgccgactccgttgagtacatggtgaacgctcactgcgctgacgcgatggtgtgtatctccaactgcgacaaaatcaccccagggatgctcatggcctcgctgcgcctgaatattccggtgatctttgtctctggcggaccgatggaagccgggaaaaccaagctttcagacaaaattatcaagctggatctggttgatgccatgattcagggagcggacccgaaagtctctgacgatcaaagtaaccaggttgaacgctccgcctgtccaacctgcggctcctgctccggcatgtttaccgctaactccatgaattgcctgaccgaagcgctgggcctgtcgcagccgggcaacggctcgctgctggcaactcacgctgaccgtaagcagttgttcctcaatgccggtaagcggattgttgaactgactaaacgctattacgagcaaaacgacgaaagtgcactgccgcgtaacatcgccagcaaagccgcgtttgaaaacgcgatgacgctggatatcgcgatgggcggttcgaccaacaccgttcttcacctgctggcggcggcgcaggaagcggaaatcgacttcaccatgagtgatatcgacaagctgtcccgcaaggtgccgcagctgtgtaaagtggcgccaagtacccagaaatatcatatggaagatgttcaccgtgccggcggtgtgctgggtattttaggcgagctggatcgcgccgggctgctgaactgcaacgtgaaaaacgtattaggcctgacgctgccgcaaacgctggaacagtacgacatcacggttacgcaggacgaagcggttaaaaaaatgttccgtgctggccctgccggtatccgtactacccaggcgttctcgcaggattgtcgctgggattcgctggatgacgaccgcgcagcgggttgcatccgctcgctggaatatgcctatagcaaagacggcggtctggcggtgctgtatggcaacttcgccgaaaacggctgcattgtgaaaaccgcaggcgtggatgacagcatccttaaatttaccggcccggctaaagtgtatgaaagccaggacgacgcggtagaggcgattctcggcggcaaagtagtggaaggcgatgtagtcgtgatccgctacgaagggccgaaaggcgggccgggaatgcaggaaatgctctatccgaccagtttcctgaagtcgatggggctgggcaaagcctgcgcgctcatcaccgatgggcgtttctccggcggtacttcgggtctttccatcggccacgtctcgccggaagcggccagcggcggcactattgcgttgattgaagatggcgacactattgcgattgatatcccgaaccgcagcattcagttgcagttgaacgaggctgaaatcgccgcacgccgtgaggcgcaggaggctcgtggcgacaaagcctggacgccgaaaaatcgtcagcgtcaggtttcgtttgccctgcgtgcctacgccagcctggcgaccagcgccgataaaggcgcggtgcgcgataaatcgaaactgggaggttgatgatggcggaatctcaaccactgtcagtcgcgccggaaggggcggagtatctgcgcgcggtgctacgcgcgccagtatacgaagcggcgcaggtgacgccgctgcaaaaaatggaaaagctctcgtcacgtctggataacgttattctcgtcaaacgcgaagaccggcagccggtacatagctttaagctgcgcggcgcttacgcgatgatggccggattgaccgaagaacaaaaagcccacggcgtgattaccgcgtcggcggggaaccatgcacagggcgtggcgttttcctccgcgcggcttggcgtgaagtctctgatcgtcatgccaaaagcaacggcggatattaaagtcgatgcggtacgcggttttggcggcgaagtgctgttgcacggcgctaattttgatgaagcgaaagcgaaagctattgaactggcgcagcagcagggttttacctgggtgccgccgtttgatcacccaatggtgatcgccgggcagggcacgctggcgctggagctgcttcagcaggattcgcatctcgatcgtgtctttgtgccggttggcggcggcggcctggcggcgggcgtagcggtactgatcaaacaattgatgccgcaaatcaaagtgattgccgtcgaagcggaggattccgcctgcctgaaagcggcgttggaagccggtcatccagtggatctcccgcgcgttgggttatttgctgaaggcgtggcggtaaaacgcatcggcgacgaaaccttccgcctgtgccaggaatatctcgacgacattattacagtcgatagcgacgctatctgcgcggcgatgaaagatctgtttgaagatgtgcgtgcggtggcggagccgtccggcgcgctggcgctggcggggatgaaaaaatatatcgccctgcacaatattcgcggcgaacgcctggcgcacgtcctttccggcgccaacgtcaacttccacggcttgcgctatgtgtctgaacgctgcgagctgggggaacagcgcgaagcgttactggcggtgaccattccggaagaaaaggggagctttctcaaattctgccagttgcttggcgggcgtatggtcaccgaatttaactaccgttttgccgacgcgaaaaatgcctgtatttttgtcggcgtacgcgtcagtcaggggctggaggagcgaaaagagattatcacccaactgtgcgacggcggttatagcgtagtggatctctccgacgatgaaatggcgaagctgcatgtgcgctatatggtcggcgggcgtccatcccatccgctacaggaacgcctctacagctttgaatttccggagtcgcccggcgcgttgctcaaattcctgcatacgcttggcacgcactggaatatttcgctattccattaccgcagccacggtaccgattatggccgcgtgctggcggcgttcgagttaggcgatcatgagccggatttcgaaacccggctgcatgagctgggctatgaatgccatgatgagagcaataacccggcgttccggttctttctggcgggttaattcagcgtttagtttttcaggcccacaaagtaaagtgggcctgatatccagatatgatcttccctcagttattgggcttttctgccagcccggagcatccactcatttaattttgcgagacgttttccagaaggcgcccaatctgcttgtggtgaaactcggctcaccatatcgttagcaccgccatcatttgcacctgttaaaagcaatgtataaaattttatacacaagggtgttatgttactcacccgagctctctccaatgaaaaagaaattcgatgggtgggatcttctctggaggatctcctggcttttcccataacggtacgtaaagcagtcggttatcagcttcacaaaattcagtatggaattgaacccgatgactggaaaccgttttcagaaattggggctggggtaaatgaaattcgtattcgtgacaacaatggtatctatcgcgttatgtatgtcgctaagtttgaagaagcactctacgttttgcatagtttccaaaaacagacgcaacaaaccagtcagcatgataaaaacatcgccagaacgcgttataaccgggtggtgcaacaacggagaaacagcttgtgattgccaaaactgatagtgatattcgccatgtgacgccatctggcggtaatgtttttgctgatttggggtttcataagcaggacgcagaaaagttttacgctgattccctgaatgaaatcgaaaacacgttagccattaaacaacagctaatggaagaaattaccctctggattacgcaaaaccagatgaagcaagccgaggttgctacagttttgcatatatcccgaccgcgcgtttcggatgtcgtcaacaagaaatgcagcaaattcaccattgatgctctggtgaatatgcttagccgtattgggaagcctgttcgggtaatggtagggccgtaaaactaattcggtaaaatcttccagaacgcatcaattagcggctcatgcagccgctttttttgcgcgcagacgccgagttcaaacggcgttttttcatcgctgcgttctaaaatcatcacccggttgcgcactggctccgggctgttttccagcaccacttccggcagcagcgccacgccgcagcccagcgccaccattgagaccatcgcttcgtgaccgccgacggtggcgtaaatctgcggattgctgattttatgccggcggaaccatagctcaatgcgacggcgtaccggcccctggtcggccatgataaacggcaccgtcgaccagtctggcttgtcgaccgaaacctgattacgcactgggcagggcagcgccggggcgatcagcaccactgccagattctccagcatcgaaaacgccaccgcaccgggcagcgtttccggcttaccggcaatcgccagatcggcctcgccggtgaccactttgtccatggcgtcggcggcgtcgccggtggtgagcttaatttccaccgagggatgttcggcgcggaagcggtcgaggatcggcggcagatgactgtatgccgcggtcaccgagcagaaaatatgcagttcgccggaaagggatggcccctgctgatcgagggtatggcgcaactgctgatattgcaaaagcgtctgttgggcaaacactcgcagctcttcacccgcttcggtcagcgtgaccgtgcggttatcacgcacaaacagcggctggccgagatcttcttccagccgctgaatctgccgggagagcgtggaggggctgacgtgcatcgcccgcgcgctgcggccaaagtggcggctttccgccagatgcaggaaggtttttagatcgcgtaaatccacagacagacctccggtttttgacgttgcataaaccgcaacataacgttgtgaatatatcaatttccgcaataaatttcctgttgtaatgtgggttcattcgcacagatagcaatctgtaaaccgaacaataagcgcgacaacacaacatcacggagtacaccatcatggctaactactttaatacactgaatctgcgccagcagctggcgcagctgggtaaatgtcgctttatgggccgcgacgaattcgccgacggcgcgagctaccttcagggtaaaaaagtggtcatcgtcggctgtggcgctcagggtctgaaccagggcctgaacatgcgtgactccggtctggatatttcctacgccctgcgtaaagaagctattgctgagaagcgcgcctcctggcgtaaagcgaccgaaaacggcttcaaagtaggcacctacgaagagctgatcccgcaggctgacctggtggttaacctgacgccggacaaacagcactccgacgttgtacgttctgtacagccgctgatgaaagacggcgcagcgctgggctactcccacggcttcaacatcgtggaagtgggagagcagatccgtaaagacatcaccgtggtgatggtggcgccgaagtgcccggggaccgaagtgcgtgaagagtacaaacgtggtttcggcgtgccgacgctgatcgccgttcacccggaaaacgatccgaaaggcgaaggcatggcgattgctaaagcctgggcggcggccaccggtggtcaccgtgcgggcgtactggaatcttctttcgtggcggaagtgaaatccgacctgatgggcgagcagactattctgtgcggtatgctgcaggccggttctctgctgtgcttcgacaagctggtggcagaaggcaccgacccggcatacgcggaaaaactgattcagttcggctgggaaaccatcaccgaagcgctgaagcagggcggcatcaccctgatgatggaccgtctgtctaacccggcgaaactgcgtgcttacgcgctgtccgaacagctgaaagagatcatggcgccgctgttccagaaacacatggatgacatcatctccggcgaattctcttccggcatgatggctgactgggcgaacgacgataagaaactgctgacctggcgtgaagagaccggtaaaaccgcgttcgaaaccgcaccgcagtttgaaggtaaaatcggcgagcaggagtacttcgataaaggcgtgctgatgatcgcgatggtgaaagcgggcgttgagctggcgttcgaaaccatggtcgattccggcatcatcgaagaatccgcttactacgaatcactgcacgaactgccgctgatcgcgaacaccatcgcccgtaagcgcctgtacgaaatgaacgtggttatctccgataccgcagaatacggtaactacctgttctcttacgcttgcgtaccgctgctgaaaccgtttatggcggaattgcaaccgggcgatctgggtagtgctatcccggaaggcgcggtagacaacgcacagcttcgcgacgtgaacgacgcgattcgtagccatgcgattgagcaggtaggtaagaaactgcgcggctatatgacggatatgaagcgtattgcggtagcgggttgatataccttgtcgggtggtgctagcgcttacccgacctacaaaatcaagcagacgatgtaggccgggtaaggcgtagccgctacccggttttttatttgcgatacaatactttaatgatgtggtaaccgaactgggtatgcagcgggccggttggctccagtaccgggcaggaaaagactactttatcgaatgccggaaccatctggccctgacgaaattcgcctaaatgaccgccttttttaccggatgggcagatagaatgcttcttcgccagcttctcaaaatcgccgccgtttttaatttgctccagaagatctaaagccagtttctcttcttttacaaggatatgcagtgctgctgccatttttgccattattgtgttctcacgtcgcaaagattggccgtcactttatcactccttaggccgtcagacatatactcttcgccattacaggacagatgtcccgcctgatttaatgaactgggagataagcggcatttttagcaggcgtatttcggatgtgcgggacggcggtcctgtcctttctgacaaggggcgagataccatgaacataatgaaaaacgcagaatttccagacgactggcttttagggctacgccaggtcgtacgcgacccagtgctctatgaattactcaaatactgcccgttggaaatcatgcagtacagggcgtttatgcgatgtcgcttgagtatgttctgctgacggcgatcgcgctaatgggttctttcagttggatcaagagcgcacagcgtaatggctatacgccgcttgccgccagagcctgctgattgaccttttccaggctgcctgaaaaagcagcctggtcttctctgggcctcgctttctgctacaatccctcccccgttcgaagattgagcactattcccatgcgtttaaatcccggccaacaacacgctgtcgaattcgtcaccggaccctgcctggtgctggcaggagcgggttctggtaaaactcgcgtaattaccaataaaatcgcccacctgatccgcggatgcggctatcaggcccggcatattgcggcggtgacgtttaccaacaaggcagcgcgtgagatgaaagaacgcgtcgggcagacgctcggccgtaaggaagcgcgcggtttgatgatctccacctttcatacgctagggctggatattattaagcgcgagtacgctgcgctggggatgaaatcgaacttttcattgtttgacgataccgaccaggtcgccttgctcaaagagctgaccgaaggcctgatcgaagacgacaaggttctgttgcaacagctgatctccacgatctccaactggaaaaacgatctcaaaacgcctgcacaggcagcggcgggggcgaaaggtgaacgcgatcgtatttttgcccactgctacgggctttacgacgcccatatgaaggcatgcaacgttctcgattttgatgatttgattttgctgccgacgctgctgctgcaacgcaatgacgaggtgcgcgagcgctggcagaataaaattcgttatctactggtggatgaatatcaggatactaacaccagccagtatgagttggttaagctgctggttgggcaacgcgcgcgctttacggtcgtaggcgatgacgatcagtctatctactcctggcgcggggcgcgtccgcaaaacctggtgttactgagccaggactttccggcgctgcaggtgattaaactggagcaaaactatcgttcttcgggccgcatcctgaaagcggcgaatattctcatcgccaacaatccgcacgtctttgaaaagcgcctcttttccgaactcggttacggcgcggaactcaaagtgttaagcgcaaacaatgaagagcatgaagctgagcgcgttaccggcgaactgattgcccatcactttgtgaacaagacccagtacaaggattacgccattctgtatcgcgggaatcatcagtcgcgggtatttgaaaaattcctcatgcagaaccgcattccgtacaaaatttccggcggcacctcattcttctcccgtccggagattaaagacctgctggcctacctgcgggtgttgaccaacccggatgatgacagcgctttcctgcgcatcgtgaatacgccaaaacgcgaaatcggtccggccacgctgcaaaagctgggtgaatgggcaatgacgcgtaataaaagcctgtttaccgccagctttgatatggggcttagccaaaagctgaccgggcgtggttacgattcattgacgcgttttacccactggctgggggaaatccagcgtctggccgaacgcgagcctgtcgccgccgtgcgcgatctcatccacggtattgactatgaatcctggttgtacgaaacctcgccgagccccaaagcggcggaaatgcgtatgaaaaacgttaaccagctctttagctggatgactgagatgctggaaggcaacgaactcgatgagccgatgacgctcacccaggtggttacacgctttacgctgcgcgatatgatggagcgcggcgagagcgaagaagagctggatcaggtacagttgatgacgcttcatgcgtcgaaaggactggaattcccgtatgtctatatggtgggaatggaagaaggatttttgccgcatcaaagcagcattgacgaagacaatattgaggaagagcgtcggctggcctatgtcgggatcactcgtgcgcagaaagagctcacctttacattatgtaaagagcgccgtcagtatggggaactggtgcgcccggaacccagtcgcttcctgttagaactgccgcaggatgatttaatctgggagcaggagcgcaaagtggtaagcgctgaggagcgaatgcaaaaagggcaaagtcacctggctaatctgaaagccatgatggcggcaaagcgagcgaaatcgtaggccggataagcgaagcgtcatccggcaatcaaactacggttagcgaacgtccagcggccagtgtacatagctttgccactggctttcctgatcaatcaactctttacccagcgggtgatgtgccagccagtcgccaggcaaggttaacgtcagattttcatttagcgcctgtagcgtaatttctggtaccagatcgtcacgacggcgaccggcaaaaagaatcgccagtcgcagcaaacggcatagctgttccgcaacacggggcggtaccgcgttttgctgatgaagcgaagagagatcgaccggattggtctgattcagtaagagggtggcgagcaattttttctgcgcgggcgtatagccaggcagatccaaatggcgtactaaataggcggcatgatagggcgcctgtttaaaatcaacgctcagaccgatctcatgcaactggcaagcgctaagcaacagttcacgactgataggctcaatatgccaggcattttctacctgtttgaggaagttatctgccagcttcgccacgcgatttgcctgatcggtatcgacgataaaccgacgctgaatgtttcgcagcgtgcggctgcggatatcctgatctaccgccagatgcaacatcccatacaccagcccttcgcgtaacgcgccgcctgccagcgtcatgctctggatgttcagctcggtaaatatcgcgatcagaatagccagcccgcttgggaaaaccagcgcgcgctccagcgtcaggccttcgatttccagctcttccagacgcccgcactgtatcgcgcgttgttttagctgctgcagtttggcgagcgtaatgcgctcgtccatcccctgcgccatcatgatttcctgcaatgcctgtacggtgccggaggcacccacgcagaccttccagccatgaaaacgcagttcatcggcgaccggacgcagtacatcgcgcgcggccttctccgcatcatcaaagttttcttgcgccagattacgatcgctaaaatagcgttcaagccacgttacgcagcccatcgacaggctaaatagcgacgtggtttgcgcgccagtgccggtaaccagttcagtgctggcgccgccgatatccaccaccagtcgctgatctgcgccgccggtggtatgagcgaccccctgataaatcagccgcgcctcttcttcgccgctgataacctgcaccggacaaccaaggatagtctgcgctttcgcgataaattcacccgcattgacggcgagacgcaatgttgcggtggcaaccacgcggatttgcggctgcgggatatcctgcaaacgttcagcaaacagacgcaggcattgccagccgcgttccatcgcttcggctgaaaggtggttgtcgttgttcagacccgcggccagacgcaccttacgttttattcgggtcagcgtctggatgcttcccgccgcctcgcgcacgaccagcatatgaaaactattggaaccgagatcaatggcggcatacaacgaggtggaattcatacacttcatccttcaacctgtatccgtgttggctgcgtactctcccctgaatcatttactaaagtaagctcatcgggatttgttttcttgccgccttgatacaggctaattgattttgtgtatggcataacttttcttaacctgaacgacgacgattacgcggagcgccagcgcggcgcggaccattgccaggacgcgaacgcgtcagacgcaacggcttgggcagatcgttcatgagcgcttccggattgtatttgctgaccggaatcgagtggccgatatagctctcaatggcgggcagattcagcgcatactcttcgcaagccaggctgatggaatgcccgctggcgccagcgcgaccggtacgaccgatacggtgaacatagtcttcacaatcgtctggcagatcgtagttaaagacgtgcgttacggcggggatatgcaacccgcgcgccgcgacatcggtcgccacaagaatatccagatcgccgcgggtgaactcatccagaatccgcaggcgctttttctgcgcgacgtcgccggtcagcagaccaacacgatggccatctgccgccagatgtccccagatatcttcgcaacgatgcttggtgttggcgaaaataatggcgcgatccggccactcttcttcgatcagcgtttgcagtaaacgcattttctcttcattagaggggtagaaaagctcttctttaatgcggtggccggtcttttgctccggttccacttcaacatattcggcgttgttcatctgttcaaacgccagctcgcgaacccgataagacagggtggcggagaacaacatgttcagacgctgcgcagccggcggcatacggcggaacagccagcggatatctttaataaagcccaaatcgtacatgcgatcggcttcatcgagtacgacgacctgaatggcgccgaggttaatgtgattttgtttggcgtagtcgatcagtcggcccgtcgtaccaataagaatatcaacgccgctttccagcactttaagctgcttgtcgtaaccatcgccgccgtaagccaggcctaattttaagcctgtcgcttgcgccaacggctccgcgtctgcgtgaatttgtacggctaattcacgcgtcggcgccatgatcagcgcgcgcggctggttcaccttgcgatcgtcgatcgcgggatgagaaagtaaataatgaaacgttgacgtcagaaacgccatcgttttcccggtaccggtttgcgcctgccctgcaacgtcacgacccgccagcgttagcggaagggccagtgcctgaatgggcgtacaattataaaacccttttttttcaagggcttcaaccacctgtgggtgcagggcgaagtcggaaaacttctgttctgttaaatgtgttttgctcatagtgtggtagaatatcagcttactattgctttacgaaagcgtatccggtgaaataaagtcaacctttgttggcgaagttaacatcagcacctcgttggttaatgctacaccaacacgccaggcttattcctgtggagttatatatgagcgataaaattattcacctgactgacgacagttttgacacggatgtactcaaagcggacggggctatcctcgttgatttctgggcagagtggtgcgggccgtgtaaaatgatcgctccgattctggatgaaatcgctgacgaatatcagggcaaattgaccgttgccaaactgaacattgaccagaacccaggtactgcgcctaaatatggcatccgcggtattccgactctgctgctgtttaaaaacggcgaagtggcggcaaccaaagtaggcgcactgtctaaaggtcagttgaaagagtttctcgacgccaatctggcgtaataccttttatacgtcgaatgacaaaggcgctgtatagtcaggcgtctgtcattcgacgaatgattaaggtatcaggcagtttcgtggcgtctgttgtccttacgttattcttaaattgtcaggatctctggacgcccggtctgagtcgtgctaagttagtattgacttcgaattaaacataccttattaagtttgaatctggttttatccgtcacttcccgttttttctcgcacgagaagtggaaagattcctggctcttcgctcattccgtcttgtcgtttcagttctgcgtactttcctgtgaccagacagcgaacagacatgagttgatagccgtaaacaggcatggatgaccctgccataccattcacaacattaagttcgagatttaccccaagtttaagaactcacaccattatgaatcttaccgaattaaagaatacgccggtttctgagctgatcactctcggcgaaagtatggggctggaaaacctggcccgtatgcgcaagcaggacattatttttgccatcctgaagcagcacgcaaagagtggcgaagatatctttggcgacggtgtgctggagatattgcaggatggatttggtttcctccgttctgcagacagctcctacctcgccggtcctgatgatatctacgtttcccccagccaaatccgccgtttcaacctccgcactggtgataccatttctggtaagattcgcccgccgaaagaaggtgaacgctattttgcgctgttgaaagttaacgaagttaactacgacaaaccggaaaacgcccgtaacaaaatcctctttgagaacttaaccccgctgcacgcaaactctcgtctgcgtatggagcgtggtaacggttctaccgaagacttaacggcgcgcgttttggatctggcttcgccgatcggtcgcggccagcgcggtctgattgtcgcgccgccgaaggcgggtaaaaccatgctgctgcagaacatcgcgcagagcattgcgtataaccacccagactgcgtgctgatggtgctgctgattgacgaacgtccggaagaagtgaccgagatgcagcgtctggtgaaaggcgaagtggttgcctctacctttgacgaaccggcatcccgccacgttcaggttgccgaaatggttatcgagaaggcgaaacgtctggttgaacacaagaaagacgttatcatcctgctcgactccatcacccgtctggcgcgtgcctacaacaccgtggtgccggcttccggtaaagtattgaccggtggtgtggacgctaacgccctgcatcgtccgaagcgtttcttcggcgcggcgcgtaacgtggaagagggcggtagcctgactatcatcgcgacggcgctaatcgataccggttccaagatggacgaagttatctacgaagagtttaaaggcaccggtaacatggagctgcatctctcgcgtaagatcgctgaaaaacgtgtcttcccggctatcgactacaaccgttccggtacccgtaaagaagagctgctcaccactcaggaagagctgcagaaaatgtggatcctgcgtaaaatcatccatccgatgggtgaaattgacgcgatggaattcctcattaacaaactggcgatgaccaaaactaatgacgactttttcgagatgatgaagcgctcataacctggtctttacctgaaaacgccacgtttttacgtggcgtttttgttttgcgattcatcctggcgtcatgtcatataaactggtcatcgggatatgcgctacagagtaacaccatgcacaatacacattgtttgcggtaaaaagtgtaatgttctaacaggtctcttctaggagctggcgtaacgcattatactttaaggaaatgatatatgctgagagcacatacactgtgaagttactcaccgctttatctgagctaatcagtatttttttattcacgaccatttttatttttcttgcgcgaaaagtagccataaaaattggtttagtggataaaccaaactttcgtaaacgacatcagggcgttatcccattagtcggcgggatttctgtgtttgcaggaatctgctttatgtttggcctctcggattactacataccgcacttatcgctatatcttatttgcgctggtgtattggtttttgttggtgcgatggatgaccgttttgatatcagtgtaaaaattcgtgctgtggttcaggctgttattgcggttgtaatgatggttatcgcaaaacttcacttaggtagccttggttacatctttgggccttgggagttagtgcttggcccctttggctatttccttactctgtttgcggtatgggcggcgatcaacgctttcaatatggtggacggtattgacggcctgctgggtgggttatccagcgtctcatttgcggcgatggggctgattttatggtttgatggtcagactagtctggcaatgtggtgctttgccatgatcgccgcgattctgccttacattatgcttaatctcggtattttggggcggcgttataaagtctttatgggcgatgccggtagtacactgattggctttaccgtcatctggcttttactggaaacgacgcaggggaaaactcactctatcagcccggttaccgcgctatggattatcgctattccattgatggatatggtggcgattatgtatcgccgtctgcgtaaagggatgagccccttttcccctgatcgccaacatattcatcatttggttatgcgagcagggtttacttcccgccaggcatttgttcttattacgctcgcagcggcgattctggcgggagtaggcgtaacggcagaatactctcattttgttcctgaatgggttatgttggtgctctttttgctagcattcttcctctatggctactgcattaagcgggcctggaaggtggcgagatttattaagcgtgtgaagcgtcgcctgcgcaggcaacgtgagaaccggccaaacttaaccaagtaaatgaggatacgatgacacaaccattaccgggggcacgcgcggtgagcgctgaaaatgaactggatattcgcgggttgtttcgtactttatgggctggcaaattctggattatcggcattggcctgctatttgcccttatcgcgttagcctataccttttttgctcgtcaggagtggagtgcgacggcgatcaccgatcgcccaaccgtaaatatgttgggcggttattactcccagcagcagtttctgcgcaacctggatattaagaccgatcctgcttcttctgataagccctcggtgatggatgaagcgtataaagagttcatcatgcaacttgcctcctgggatacgcgtcgcgatttctggttacagacggactattacaagcagcgaatggtcgggaatagcaaagctgatgcggcgatgcttgatgaactgatcaataacatacagtttacgcccggcgattttacacgcgccatcaacgacaatgtgaagctgattgctgaaactgcgccggacgccaataatctgctgcgtcagtatgtcgcattcgccagccagcgggcggcgagccatctgaatgatgaattaaaaggtgcctgggctgcgcgtaccgtgcagatgaaagcccaggtcaaacggcaggaggaggttgcgaaagcgatctattcgcgtcgtgtaaacagtattgagcaggcgctcaaaattgcggaacaacataatatttctcgtagcgcgacggatgtcccggcggatgaattaccggactcagagctttttttactcggtcgccctatgttgcaggcgcgtcttgaaaatctgcaagcggttggccctgcgttcgatttggactactttcaaaatcgggcaatgttgaatacgcttaatgtggggccgaccctggaccctcgttttcagacctatcgttatttgcgtacgccggaagaaccggtaaaacgtgatagcccacgccgagccttcctgatgatcatgtggggtatcgttggggcgctaatcggtgcgggcgttgccttaacccgtcgccgcacgatttagcaacacctctgcagtagggggctgggcccctactgtctattcgaagagaatcgatgtgaaagtactgactgtatttggtacacgaccggaggccattaagatggcgcctctggtccatgcgctggaaaaagatcctcatttcgaggccaaagtatgcgttactgcgcagcatcgggagatgcttgatcaggtattaactcttttttctattgtgcctgattacgatctcaacattatgcagccgggacaggggttgacggaaattacctgccgaattctggagggattaaagccgatcctggcagattttaaacctgatgtggtgctggttcatggcgataccaccactacgattgctaccagcctggcggctttctatcaacgaattccggtagggcacgtagaagccgggttgcgaaccggcgatctctattccccctggccggaagaggcaaaccgcacgctgaccggacatctggcgatgtaccactttgcgccgacggaaaactcgcggcagaatctgttgcgggagaacattccggatgagcgcatttttgtcactggcaataccgttattgacgcgctgatctgggtacgcgatcgcgttctgacgagcgatacattacaggctgaactggccgagcagtatcctttcctcaacgcgaataagaagatgattttggtgaccggtcatcggcgtgaaagctttggtcagggctttgagcatatctgccaggcgctggcggaaatcgccgccgcgaaccagaatgtgcaaattgtctatccggtgcatctcaatcccaacgtcagcgaacctgtcaaccgtatcctcggccatgttgaaaacgtggtactgattgagccgcaggactacttaccttttgtctggctgatgaatcacgcctggctcattctgaccgattccggcggtattcaggaagaagcgccgtcattaggtaagccggtattggtcatgcgtgaaaccacagagcgtccggaagccattaccgctggtacggtaagactgatcggcacggactcccggcgcattgtggcggaagttatgcgtctgctgcacgacgaaaatgaatatcaaaccatgagccgcgcccataatccttatggtgacgggcaatcatgcgcgcgcattttacaggcgttaaaaagttatcgggtatcgttatgagttttacgaccatttctgttattgggctggggtatatcggattaccgactgcggccgcttttgcttcccgccagaagcaggttatcggcgtggatatcaaccaacatgcggtagacaccataaatcgcggtgaaattcacatcgtggagccggcgttgggcaatgtggtgaagatggcggtggaaggcggctttctgcgtgcgacgacgacacctgtcgaggccgatgcgtacctgattgccgtgccgacgccattcaaaggcgatcacgaccctgacatggcctatgtggaagccgcggcgaaatccattgcgccggtattaaaaaaaggggcactggtgattctggaatcaacatcgccggtcggcgcaacggagcaaatggctggctggctggccgggatgcgcccggatctgacctttccccagcaggcgggcgagcaggccgacgtgaatatcgcctattgtccggagcgtgtgctgccgggtcaggtgatggtggaactcattaaaaatgaccgcgtgattggcggtatgacgccagtatgttcggctcgcgccagcgcgctgtacaaaattttccttgagggcgaatgcgttgtcaccaactcgcgcaccgcagagatgtgcaagctgacggaaaatagcttccgtgatgtgaatatcgcctttgcgaatgaattgtcgctgatttgcgccgaacaggggattaacgtctgggaattgatccgtctggcgaaccgccatccgcgcgtcaatattttgcagccgggcccaggcgttggcgggcactgcattgcggtcgatccgtggtttattgtggcgcaaaatccgcagcaggcgagactgattcgcaccgcgcgtgaagtgaacgacggcaaaccgcactgggtggtcgatcaggtaaaagccgcggtcgcagattgcctggcggccaccgataaacgcgccagcgaagtgaaaatcgcctgttttgggctggcctttaagccgaatatcgacgatctgcgcgaaagcccggcgatggggatcgcgcaaagtatcgcccgctggcacagcggcgaaaccctggtcgtcgaaccgaatatccgtcagttgccgaaaaaattggacggactttgcacgctggcgaaactggacgcggcgctgaccgccgccgatgtgctggtgatgctggtcgatcacgacgaatttaaagcgattcccggcgatgcggttcatcaacgttatgtggttgataccaaaggagtctggcgctgatgaaacgcattctggtgaccggaggcgcaggctttatcggatctgcggtggtgcggcatatcatccatgaaacggcagacgcggtggtggtggtggataaactcacctatgcgggcaacctgatgtctctggcgtcggtggcgcaaagcgaccgtttcgcctttgagaaggtggatatctgcgatcgggcatcactggagcgagttttccagcagtatcagcccgatagcgtgatgcacctggcggcggaaagccatgtagaccgttccatcgacggcccggcggcgtttattgaaacgaatatcgttggtacttacaccttgctggaagccgctcgcgcttactggtccgcgcttgacgcggacgctaaagcggcgttccgcttccaccatatctccaccgatgaagtgtatggcgatctgcatactgcagacgatttcttcaccgaaaccacgccatatgcgccaagcagcccttattccgcctccaaagccagcagcgaccatctggtacgcgcctggttacgtacctacggtctgcctacgcttgtcaccaactgctctaataactacgggccctaccatttcccggaaaaactgatcccgctgatgattctgaacgcgctggcgggtaaaccattgccggtctatggcaacggtcagcaaattcgcgactggctgtatgtagaggatcatgcccgtgcgttgtatcacgtggtgacgaacggcgcggtgggcgaaacgtataatatcggcggtcataacgaacgtaaaaatctggatgtggtcaggacgatctgcgctctgctggaagaactggccccacaaaaaccgcagggtgtggcgaattatcacgatctgattaccttcgtcgacgatcgacccggccatgacttacgttatgccatcgacgcgtcgaaaatcgcccgcgagctgggctggacgccgcaggaaaccttcgaaagcgggatgcgaaaaaccgttcagtggtatctcgccaatgaggcctggtggaaacccgtgcaggatggcagttatcagggcgaacgcttaggactgaaacgctaaacggcaggttcttactcctggaggagaaacgaatgaaaggcatcattctggcgggaggttccggtacccggttgcatcccattacgcgcggcgtatcaaagcgccagggcttcaaaattgcctgtctggaggagattgcctggcgcaacggctggctggatgatgatggtttgaaacgcgccgccagtcagcttgaaaaaaccggctatggccaatatttactggagttgctccgtgcccgtccgcgccagtattgaaccgttactctgggaaaatacgttttttggcgtgaatagcggcattgtgcgtatcgatgcctcagcgcccgaattaacgccagaagcgctgcaggcgtggcaacgcgtgcaggtaaaagtgccggctgaaaacatcgcctggctgtcggcgttgcaatcgctgggattctctttggttgaaggcgaggtggattttgcgttgccggtaaaagggcatcgcgaccagcatggcgcggaaattgcacaccttacggacattcctgctttgcgtcagttggccggagaggcgtttacgcagagtcgttttcgcgcgccgtggtatgcgcccgacgccagcgcccgtttttacgcccagtggattgagaatgcggtacgcggcacgtttgatcaccaatgcctggtgcttcgcacggagacaggcgctatccgcggttacgtctcgctgcgggaattgaatgataccgacgcgcgcattggcctgttggccggacgcggcgcgggagcggaacttatgcaggcggcgatctgttgggcgcagagtcgcggcaaagcaacattgcgggtggcgacccagttgggcaacaccgccgcgcttaaacgttacatacaaagcggtgccaacatcgaaagcactgcgtactggttatacaggtgacaacatgattccttttaatgcgccgccggtggtgggaaccgaactcgaatacatgcagtctgcaatgagcagcggcaaactgtgtggcgacggcggctttacgcgtcgttgccagcagtggctggagcaacatttcggcagcgcgaaggtgttgctaacgccttcctgtaccgcatcgctggagatggcggctctgttgttggatattcagcccggcgatgaagtgatcatgccgagctttacgtttgtctccactgctaacgcttttgtcctgcgcggcgcgaaaattgtgtttgtcgatattcgtccggatacgatgaatattgacgaaacgctgattgaggcggcgattactgataaaacccgcgctatcgtgccggtacactacgctggcgtcgcttgtgaaatggacgtcatcatggcgctggcggataagtataatctgttcgttgtcgaggatgccgcccagggtgtgatgtccacgtacaaagggcgcgcattagggacgatcggtcacatcggctgttttagcttccatgaaaccaaaaattacaccgctggcggcgaaggcggcgcgacgctgatcaacgatcgtacgctaattgaacgcgcggagatcatccgcgaaaaaggcaccaaccgtagccagttcttccgtggtcaggtggacaaatacacctggcgggatatcggctccagttatttgatgtccgatctgcaggctgcctatctgtgggcgcaactggaggccgccgatcgtatcaatcaacagcgtctgtcgctgtggcagacttactacgatgcgttaacgccgctggcgcgcgccgggcgtatcgagctgccttctattccggaaaactgcgggcataatgcccacatgttttacatcaaactgcgggatatcgccgatcgcagcgcgctgattaatttcctgaaagaggcggaaatcatggcggtattccattacattccgctgcatgattgtccggcgggcgataaattcggcgagtttatcggggacgatgtctacaccacaaaagagagcgaacgtttgttgcgtctgccgctgttttataaccttgcgcccgtcgatcaacgaacggtgattactaccttgctaaattatttctcctgatatgtcgcttgctaaagcctccctgtggacggcggtcagtacgctggtaaaaattggcgccggactgctggtggtgaaactactggccgtctcttttggtccgtcgggcgtcggacaagcgggtaacttccgccagatgattaccgtgctgggcgtattggctggcgccgggatatttaacggcgttaccaaacttgtcgcacaacatcatgataacccggcgcagttacgtaccgtggtgggaacctcctccgcgatggtattggggttctctacgctgctggcgctggtcttcttgctggcggcggcgccgattagccagggattgttcggtcacacggactatcaagggctggtgcgtctggttgcgctggtacaaatggggatcgcctgggcgaacctgctgctggcgctaatgaagggctttcgtgacgcgtcgggtaatgccttatcgttaattgtcggcagctttttgggcgtcgccgcttggtatctctgctaccgtgtcggcggctatgaaggtgctctgcttggtctggcgctggtgccggcgctggtagtagtaccagccggtatgatactgattaagcgcggcaccgtcccgctacgctatctcaagccctcctgggacaatggtctggcagggcagctcagtaaatttaccctgatggcgctgattacctccgttacgatgccggtcgcctatgtgatgatgcgaaaccaactggccgcgcactatagctggagcgatgtcgggatctggcagggcgtaagcagtatttctgacgcctatctgcaatttatcaccgcctccttcagcgtttacctgttacccacgctctcacgcctgacggaaaaacaggacattacgcgtgaagtggtaaaagcgctgaaatttgttttaccagcggttgcggcggcgagttttaccgtctggctactgcgcgattttgctatctggctgcttttttccgccaaattcaccgcgatgcgcgatctgttcgcctggcagttagtgggcgacgtgctgaaagttggcgcctatgttttcggttatctggtgattgccaaagcgtcgttgcgattttacattctggccgaaattagccagttcattctgttaacggcgttcgctcactggctgattcccgctcacggcgcgctgggtgcggcacaggcttatatggtcacctatattgtctatttttcactttgttgcggcgtatttttactctggcgtaggcgagcatgactgtactgattcacgtcctgggatcggatatccctcaccataaccacaccgtgctgcggtttttcaatgatacgctggccgccacaagcgagcacgcgcgcgaatttatggttgccggtgaagataacggcttcacggaaagctgcccggcgctctcgcttcgtttttatggcagtaagaaagcgctggcgcaggcggtcatcgccaaagcgaaagcaaatcgtcgacagagattcttctttcacggtcagttcaacaccagcctgtggctggcgctgttaagcggcggtattaagccagctcagttttactggcatatctggggcgcggatctctacgaagtgtccaacgggctgaaattccgccttttctacccgcttcgtcgtatcgcgcaggggcgagtagggtgcgtattcgcgacgcgcggcgatctcagctattttgcgcgccagcatccgaacgtacgcggcgagttgctctatttcccgacgcgcatggatccttccctgaatgctatggcaaaagagtgccaacgtgcggggaaattgaccattttagtagggaactccggcgatcgcagtaaccaacatattgcggcgttacgggcggtgtatcagcagtttggcgatacggtaaacgtggtggtgccgatgggctatccggccaataaccaggcctatattgatgaggttcgccaggccggcctggcgctatttagcgccgaaaatctacaaattcttagcgaaaaaatggaatttgatgcctatcttgcgcttttgcgccagtgcgacctcggttattttatttttgcccgccaacaggggatcgggacgttgtgtctgctaattcaggccgatatcccgtgcgtactgaaccgcgacaatcctttctggcaggatatggcggaacagcatctgcccgtcctgtttaccacggacgatcttaatgagcaggtcgtgcgcgaggcgcagcgtcagctcgcatcggtagataaaagcggcatcaccttctttagccccaactacctgcagccgtggcataatgcgttgagaatcgccgcaggagaagccgaatgagtttaatgcaattcagcgggctgctggtggtctggctgctctctacgctgtttatcgccacgctgacctggtttgaattccgccgcgtgcgttttaacttcaacgttttcttttcgttgctgtttttgttgaccttcttttttggttttccgctaaccagcgtgctggtatttcgtttcgacgttggcgtcgcgccgccggaaatcttattgcaggctctattatccgccgcctgtttctacggcgtgtattacgtgacctataaaacgcgtttacgcaaacgcgttgtggatgtaccacgcaagccgctatttaccatgaaccgggtggaaacccaccttacctgggtgatcctgatgggcatcgcgctggtgagcgtggcgattttctttatgcataacggctttttgctgttccggctgcactcctacagccagatattttccagcgaagtctccggcgtggcgttaaaacggttcttctatttcttcattccggcgatgctggtggtctatttcctgcgccaggacagcaaagcgtggctgttctttctggtgagcaccgtcgcgtttggtctgttgacctacatgattgtcggcggcacgcgcgctaacatcattattgcgtttgctatcttcctgtttatcggcattattcggggctggatcagcctgtggatgctggcggcggcgggcgtgctggggattgtcggtatgttctggctggcgctcaaacgctacggattaaatgtgagcggcgatgaggcgttctatacgtttctttatctgacgcgcgataccttttcgccgtgggagaatctggcgctgctgttgcaaaattaccacaatatcgattttcaggggctggcccctatcgtgcgtgatttctacgtctttattcccacctggttatggccgggacgacccagtattgtgctgaactctgcgaattacttcacctgggaagtcctgaacaaccattctggcctggcgatatcgccaacgcttatcggatcgctggtggtcatgggcggggcgctgtttattccgctcggcgcgatcgtcgtcgggctgattatcaaatggttcgactggctgtatgaactgggtaaccgggagcccaatcgctataaggcggcgattctgcacagtttctgctttggcgccatctttaatatgattgtgctggcgcgagaagggctggattcgtttgtttcgcgcgtggttttcttcctggtggtttttggcgccagcctgctggtcgctaagcttctgttctggttatttgatagcgccgggctgattcataaacgtacaacttcgctccctcaggcacaggtggaaggaaaactatgaccaataatgccgctgcgcccctttactcgctgcgtggattacctctgattggctggcgcgacatgtcacacgcgctgaattatctgtttgccgatggtcaactgaagcaaggcacgttggtggcgatcaacgccgaaaagctgctgacggcggaagataatccggaagtccgcgcgttgatagcggcggcggaatttaaatatgccgatggcatcagcgtggtgcgttcaatacgtaaaaaatttccgcaggcgcaggtttctcgcgtggctggcgccgacctttgggaagcgttaatggcgcgcgcggggaaagaaggcacaccggtatttcttgtcggcggcaagcctgaggtgctggcgcagacggaagcaaaactgcggacgcagtggaacgtcaatattgtgggtagccaggacggttactttacgccggagcagcgtcaggcgctatttgcgcgtatccatgccagcggcgcgaaaattgtcaccgtcgcgatgggatcgccaaaacaggaattactcatgcgcgattgtcgggaagtgcatccccatgcgctatatatgggggtgggcggtacctatgatgtgtttaccggtcacgtcaaacgcgccccaaaaatatggcagaacctggggctggagtggttgtatcgtctgctttctcaaccgaggcgtattacccgccagatgcgcctgctgcgctatcttcgctggcactatactggcgatctctaattctcccttctgatgacttgagcagcggattgtgcttatggtgctgctcatttacaacataatcgatgatttcttacacaataagtgcatttttttaatgctccatttgccatttgtccaaatttaagaaaatattcgcaacaatcgatgtacccataacaataaccggtactaccggaaccgttgcaaacacgacatgaggatttatggcagagaaaaaaccggagctacagcgtgggctggaagctcgtcatattgaattgattgccctcgggggcaccatcggcgtcggactctttatgggcgccgccagtacgctgaaatgggcgggcccgtcagtgctgctggcgtatatcatcgccggattgttcgtctttttcatcatgcgttcgatgggggagatgctctttctggaacctgttaccggctcctttgccgtgtacgcccaccggtatatgagtcctttttttggctatcttaccgcctggtcatactggtttatgtggatggcggtcgggatctcggaaattaccgccattggggtctacgtccagttctggtttccggagatggcgcagtggataccggcgctgattgccgtcggacttgttgcgttggcgaatttggctgcggtgcgcctgtatggtgaaatcgagttctggtttgcgatgatcaaagtcaccacgattattgtgatgatcatcatcggtctgggggtgattttcttcggctttggtaacggcggccaggcgattggctttggtaatctgaccgagcatggcggcttttttgccggcggctggaaaggctttctgaccgcattatgtatcgtggtggcctcttatcaaggggttgagttgatcggtattaccgccggtgaagcgaagaatccacaggtgacgttgcgtagcgcggtgggtaaggtgctgtggcgtatcctgattttttatgttggcgcgattttcgtgatcgtcaccattttcccgtggaatgagattggcagcaacggcagtccctttgtgctcaccttcgcgaaaatcggcatcaccgccgcggcaggcattatcaactttgtcgtgctgacggcggcgctctccggctgtaacagcggaatgtatagctgtgggcgtatgctttacgcgctggcgaaaaaccgtcaactgccggcggcagtcgcgaaagtctctcgccacggcgtgccggtcgcgggcgtggcgctctctattttgattttgctggtaggttcttgcctgaactacatcatccccaatccgcagcgcgtctttgtttacgtttatagcgccagcgtactgccggggatggtgccgtggtttgtcattctgattagccaactgcgctttcgtcgggcgcataaagaagcgattgcggatcatccttttcgttccattatgtttccgtgggcgaactatttgacgatggcgtttctggtttgcgttttaatcggcatgtactttaatgaagatacgcgcatgtcgctgtttgtcggcgtcatcttcctgctggccgtcacgctggtctacaaagttttcggtctgaatcgtcacggaaccgcccacaaggtgggggaataagcgccaaaatgcgcaaagcataaccaaacgcgcattttatttaaaaaggcactggacagcggggtgtgaagtccgtattatccacccccgcaacggcgctaagcgcccgtagctcagctggatagagcgctgccctccggaggcagaggtctcaggttcgaatcctgtcgggcgtaccatttatttaggtgcttgagctgcggtggtttaataccgcgtaaaaagtttcagtggtggctatagctcagttggtagagccctggattgtgattccagttgtcgtgggttcgaatcccattagccaccccattaatatagagttgtgaaacgcgaaggtggcggaattggtagacgcgctagcttcaggtgttagtgtccttacggacgtgggggttcaagtcccccccctcgcaccacgactcaatgaattgaactaaaaattcaaaaaagcagtatatcggcgagtagcgcagcttggtagcgcaactggtttgggaccagtgggtcggaggttcgaatcctctctcgccgaccaattttgaaccccgcttcggcggggttttttgttttctgttcattttcaaccccttatcccgcacgtgttgccattatggtttattggcgatatcccagtcttcatttgtcgctattcggtgacgaataatctattgatttataatcactttgtaaaaagcatcctgttctgtctccgccgggcgacacgctaaaacctcgccagcggtggggggatgacaatcgcgtgaattgtctacgtttttttaatgcctgcgcctgttttttagcggtgcaaagatggcacgttatgtgcaataatgtacgggtagatgctcattccatctcttatgttcgccttctggcctcataaactcaggaatgatgcagagccgtttacggtgcttatcgtccactgacagatgtcgcttacgcctcatcaaacaccctggacacaacgttgagtgaagcacccctttatgttgtcatacagacctgttttgacgcctgccccttaaccgggcaggcgtttttttatgcatcccgaatgattttgtgtaggcggtaggcccggtaagcgaagcgccaccgggcaagagggaattactgcgggggattgttctgtaatgtcagcatcaagccatcgcgccgcatggcggcggcctcttccggttgatgcagtcgatcaagcgcatcggcaagccaggcataatcatacgcgtccgggcgttgttttagcgcggcgcggaaagccagggttgcctcctgccattcaccgtgtttcattagcgactggccgagcgtgctccataacagcgggcgatcgcctaccgtcttgatttgctgacgcagcactttctccagttgttccggattattggttctgaggcgaggaatgggcagcaccagccgatcgtcatactggcgtttcagaccgtcgatgataatctgctgcgccatatcatgatcgtcacattcgatcagatgctcggccatcgcgacctgcagcgccacctgatggcgggttttacggctttggtttttccaccaggtgcgtaatccttcgctgccctgctcggcgcgcgcctgatccatgagtcctatccacgcctgttgttcgagcatggcgcgatgcgcttcatcgccgacgtgcgctttcgccatggatgggatgatatccagtaaagaactccatgcgctggtgcgaatataggcctgctccgccagacgcagaacttccgggtgacgcggcgtgacctccagcagtttgtccacgccgtgacgcgctgcgtgattttcattgcgcgccagctgtaagcgcacgcgcgtgatctcgaccgggatggtgtcgttccccgccagctctgccgcacgttcaaggtgctgattagcgcgtgcttcatcgccgcgctgctgcgccgcttctgccgccagcagataatttaccaccggttgttcagcatggtcggcattttttgacatcagcttttcaacctgctgatagtcgccctccgccagcttcagcagcgcctgttcggtctgcttgcgggcgcgacggcgtttacgaccggcaaaccaaccgcgggtgtgcgcgccggtacgaaacagacggcgtagtaaccactcaatggcgaatagcaccaccatagcgacgatgagaatgatcgccaggccggtgacgctggtttcaatgttgtagttatcggtctggattaacacatagccctggtgaccggctatcatcgggccgaccacgatacccgcaagcaacaacacaaagagcaataatacttttagcatcattattctccttgcggcgcggctgccggagcgtctgtctgcgtggcaggcgctgccgtagagactgtcggttgcgccagcagattacgcacgcgggtttgcatcagtttttcaagaatcgcctggcttcccagagtttccggcagatccatcgtgatattttgctggcttaatttatcgacctcctccaggaaggcttttgtcgcggcgtcgtcagtatcgtaataagcgcgaacccaggtcgaaacgttatccagcgcctgacggtatgtttcttcctgatggcgtggcacggcctgcgcggcgactaacaggcgggagcgaatattttcgcgtaaatagacgtcctggttgggcgccaacagcggtacggcggtatcatcgcggcggcgaatggtaataaagctgtccataaagttctgccagcttttttgcaggttaacgcgccattcgcttagcgagctggacagctcgctgctgtctgaatccatcggcgaaccatcggtatcgttatccgccagacgcaggttatcgatttggttagagagctgattgagcttgagaataatgccgtcgtagtcgatctgcgcaacggatgacaggctggcgatatcgtcagtaatcgcgcgtcgtgcggtaatcaggctggggtcattcatgtccgccagactggcgtcagcgcttttgagcagcgcagcggcggtagtgacgtcctgatcgctccacagtttacgtccggcgagtttcaccaggaaatcagcctgcgccagcagccaggttttagcatcgctgccggaaatggtggcgactttttgttgtacttcatcaagctgtttcgccagcgccgcctgttggcgattcgcgtcatctaactgcgccgcttgttttttgataatcccttccagctccgctttttggctctcctgcgccttttgcaaggcggtcagttgcgtcgccagcgcatcgctggtttccgtttgcgcggttgcttgctgtttcccccagccataaagcccaatacctgccgccagggcaatcgcaatcgccaccgcgcttaataccagcgcggcgccgttcttactttttttctcggtattaactggctgtggcgtggtttccacgctctccctggtctcatcaaccacggcggaggatttttcttgttccgtcattatggcatcccattatgagagttattgtaatgcgcgcaacagcgcatcgttgtcggcgttatcagcgaccttaatatcttgccagcccagctcccgggcgaggtgcgccagacgttcactgacgaccaatagccgacagcgtagtaaccagtgctcacgataccactcgggagtcagcgaccagagccgttgcaacatctcgccgctggtaacaacaagcgttgttacgccgcgagtatgccagcgcatcgcttcttccgcgccatcgtaatgtttcgcacatcgttgataacattcacaaaaactgacttcggctccgcgagctgtcagggtttcgcccagcagttcgcggccgccattgccacgcaaaatcagcgcgcgtttgcccgcaatattttgtaattcaggtaattgtagcaaggcttcgctgatttcccgatccaatggataacgaatatcgaacccgctaacggtatgaagggcgagcgccgtggtgcggccaatcgcgaaatagcgcggcgacgcaggccagtttcggccatcccgctggagctgggcgtgagcaaaggcgacggcgtgctgtgaaagggcaaaaaccagatcgttttccgtcagtgtcgccaggcggtcggccagggtgggtagctcccggccggcgacaaattcaatcagtggaaaactccaggccacctgccccagtgcgcgcagacggctcactaacgcttcccctgcgggagaggggcgggtgatcagaatactcatgcgggcgtctcgccgttataaacttccgtcagaatcgcgcgtgcgccgttttccagcagttcctctgcaagcgagatgcccatttgctccgcctgctcgggagaaccacgacgttcgccgcgcaccatcaccgaaccgtccggcgcgccaaccagcgcgcgtagccaaatttcaccgttgatgatttctgcatagctgccaatcggcacctgacaaccgccttccaggcgggtgttcatagcgcgttccgccgttacgcgcagcgcggtttgcgagtgattcaacggtgcgagcagcgcctgtgttcgcgcgtcgtcaagacgacactcaatcccgacggcgccctggcctacggcaggaagtgaaacgtcgggcggcaaggctgtgcgaatgcgcgactccagacctaagcgtttcagaccggccacggccaggataatggcgtcataatcgccgttgtccagcttgccgagacgtgtgccaacgttgccacgcaacgaacggataatgaggtccggacggcgttccgccagttgacactgacgacgcaaactggacgtcccgacgatactacccgcgggcagatcgtccagactgtgatatttattcgagacaaacgcgtcgcgcggatcttcgcgctcgcaaatggtcaccagaccgagaccgtccgggaaggccaccggaacgtctttcatagagtgcacggcgatatcagcgcgtttttccagcagcgcgatttcaagctctttaacaaacagtcccttaccgcccactttcgccaggggagtatcgagaatcacgtcgccgcgtgtgaccatcggcaccagttctaccgtcagtcccggatgggttgccatcaatgcgtctttgacataatgtgcctgccaaagcgcaaggggactttggcgtgtggcaattcttaaaacattgtctaacatgcttgttaccgtcattatcaatcattgaccatcctaacatccttatagagagtatgttagttttccggtcaccgtgagtgagaggataaggcgcagtgtcgtcaaggacagtgaataatgacgagaaaccgccagcccgtatttaagaatttacacgcagcgaacggtgctacacttgtatgtagcgcatctttctttacggtcaatgagcaaggtgttaaattgatcacgttttagaccattttttcgtcggtattagataaaaatatgcaggcgagaaagggtaacggttatttttgacatacggtttatcccgaatggcgacggtcaagtactgacctgcaccatgacgggtagcaacatcaggcgatacgtcttgtacctctatattgagactctgaaacagagactggatgccataaatcaactgcgtgtggatcgcgcgcttgctgccatgggacccgcttttcagcaggtttacagtcttctgccgacattattgcactatcaccatccactgatgccgggttaccttgatggtaacgttcccagcggtatttgcttctacacgcctgatgaaacccaacgccactatctgaacgaacttgagctgtaccgcggtatgacgccgcaggacccgccgaagggcgagctgccgattaccggcgtttacaccatgggcagcacctcctcggttgggcagagctgctcgtccgacctggatatctgggtgtgccatcagtcctggctcgacggtgaagagcgtcagttgctgcaacgtaagtgtagcctgctggaaagctgggccgcctcgcttggcgttgaggtgagcttcttcctgatcgacgagaaccgtttccgccataacgaaagcggcagtctgggcggggaagactgtggttctacgcagcatatcctgttgcttgatgagttttatcgtaccgctgtgcgcctggccgggaaacgtatcctgtggagtatggtgccgtgcgacgaagaagagcattacgacgactatgtcatgacgctctacgcgcagggcgtattaacgccaaacgaatggctggatctggggggcttaagctcgctctccgccgaagagtactttggcgccagcctgtggcagctatacaagagcattgactcgccgtacaaagcggtgctgaaaacgctgctgctggaagcctattcatgggaatatcctaacccacgtctgctggcgaaagatattaaacaacgtctgcatgacggtgaaatcgtatcgtttggactcgatccctactgcatgatgctggaacgggtcactgaatacctgacggcgattgaagatccgacgcggctggatttagtccgccgctgcttttacctgaaagtgtgcgagaaattaagtcgcgagcgtgcctgcgtaggctggcgtcgggaagtattaagccagttagtcagcgagtggggatgggacgacgcgcgtctgaccatgctcgataatcgcgcaaactggaaaatcgatcaggtgcgcgaagcccacaacgaattgctcgacgccatgatgcaaagctatcgtaatctgattcgctttgcgcggcgcaacaacctcagcgtgagtgccagcccgcaggatatcggcgtactgacgcgtaagctgtacgctgcttttgaagcgttgccgggtaaagtcacgctggtgaacccgcagatatcgccggatctgtccgagccgaatttaacctttatccatgtgccgccgggacgcgccaaccgttcaggctggtatctctacaaccgcgcgccgaacatggattccatcatcagccatcagccgctggaatataaccgttatcttaataagctggtcgcgtgggcgtggttcaacggcctgctgacgtcgcgaacgcatctgtttattaagggcaacggtattgtcgacctgcctaagttgcaggagatggtcgccgatgtttcgcaccatttcccgctgcgcttgcctgctccgacgccgaaagcgctctacagcccctgtgaaattcgccatctggcgattatcgttaacctcgaatatgacccgacggcggcgtttcgcaataaagtggtccattttgacttccgtaagctggatgttttcagctttggcgaagagcaaaactgtctgataggcagtatcgacttgttatatcgcaactcgtggaacgaagtgcgtactctgcactttaacggcgagcaggcgatgatcgaagcgctgaaaacgattctggggaaaatgcaccaggatgccgcgccgccggatagcgtggaggtgttctgctacagtcagcatcttcgcggtctgattcgcacccgcgtgcagcaactggtctccgaatgtatcgagctacgtctttccagcacccgtcaggagaccggtcgcttcaaggcgctgcgggtttccgggcagacgtggggactattcttcgaacgcttgaatgtctcggtgcagaagctggagaacgctatcgaattctacggcgcgatttcgcataacaagctgcacgggctgtcggtacaggtggaaaccaaccaggtgaaattgccgtcagtggtggatggcttcgccagcgaagggattatccagttcttctttgaagaaacgggcgatgagaaaggctttaatatttatattctggatgaaagtaaccgggcggaagtgtatcaccactgcgaaggtagcaaggaagaactggtgcgcgacgtcagtcgcttctattcatcatcgcacgatcgcttcacgtatggctccagttttatcaactttaacctgccgcagttctaccagatagtgaaaaccgatggccgcgcgcaggtgatcccattccgtacgcagcctatcaacaccgtgccgccagcaaaccaggatcatgacgcgccgctattgcagcagtatttttcctgaggatttttgcccggtggcggctacgccttaccgggtctacagtaagccggataagcaaagcgcatccggcaaataaatcaacgaaagctcaccttttcacccgcctgctgcgttgccgcctgctccagcagatcccagaacgtttcgccgctgcgatcgcaaacccactcgtcgcctttcagatcgaaatgatagccgccctgtttggtcgccagccacacctggtgcaacggctcctgacggttaataatgatcttactgccgttctcaaagctgagggtcagcacgccgccgttgatttcgcagtcgatatcgctgtcgccgtcccagttatcgaggcgttcttcaatggtgagccacagggcgtcagccaggcgatgaaattcactgtcgttcattgttttatcccgctattgagtgatatcgccagtataaggggaagcgtcagcttctggaaccgatacgaattaccgttgtgagcggtaaaggataaaactcagcggtaggtaaatgacgataaatagcgcactggtgataagtatgacggacgcgttaaccgggaaatggttcagagccgacagcattgccaccatcagcgcgacgcagccgccgcagaggagaaaatgcaacaggattaagggggcgcgcggctttgctttgatatccaaaagagcgctaagcagaccgagtaccgcgcttatcgtcaggactccggcagcttcaacaccgtttatcgtgccgtgcataacgctttcaacaatgacgtaaatgcatgaaccgatccccacgccccgaagggcgtttttcagatgtttattcaaacgcgcaaaacggtttagcggcgtcatttttggcattcctgcgcctgcgttatgatgatgatatctttattattggtgtacatgacgttcctattcagagtatgcgacttatccgggcagggggatgctgttcggtaaagctggctgccaatccacgtataaacatagcggttgtcatacgcaaaacgctcggtgacttttagcggcccattgatgctaaagacatgaataccctgaccttgctggctatcacgcataaaatagccatgctcttttccggcgttaatttcccggttcaggaagggggctgggctatccagttccagccctgatttgccgggttaatcaatgaattgggtaaccgacgcaggcgtttgaaattcacctccggcaacgaaagattgttctcctcttctggctggagataaaccacgccgctgccttgccgttgataaacattgtgcggagattcactcagccggcatccccaggcgggaggtagcagaagtgaaagcgaaaaaaggcaaaacaaattacgatattgcataaggtcatccggacgtggtacgtaaacctaaagtgatgagcaaagcatgtttcctgatgtaaatgcgcaataatcatggcaacgcgccgcttttcagattttataaagagcccctaaacgcttgcttttacgccttctcctgcgatgatagaaaatagaaagcatgaacttacaggcaatccataatgaaaaacgtgtttaagacactcgctgtacttctgactctgttcagcctgacgggctgcggtttgaaagggccgctttatttcccgccagccgataaaaatgcgccgccgccgacgaaaaaagtcgattcgcaaacgcagtccacgatgcccgataagaacgatcgcgcaacgggagatggcccgtcccaggtcaattactgaggatagttttctgtccccgcgtgaacggagtgaatgatgcaattctctaaaatgcatggccttggcaacgattttatggtcgtcgacgcggtaacgcagaatgtctttttttcgccggaactgattcgtcggctatccgacagacacctgggcgtagggttcgatcagctgctggtggttgagccgccctatgatcctgagttggactttcattaccgcatcttcaacgccgacggcagtgaagtctcgcagtgcggcaatggcgcgcgctgtttcgcgcgatttgttcgcctgaaagggctaaccaataaacgcgacattcgggtcagtaccgcgaatggccggatggtactgagcgtcacggaagatgaactggtgcgggtgaatatgggggagccaaactttgaacccgcgcaggtgccttttcgcgccaacaaagcggaaaagacgtatattatgcgagcggcggaacagaccatactgtgcggcgtggtttcaatgggcaatccgcactgtgtcattcaggttgataacgtcgacacggcggccgttgaaacactggggccggttctggaaagccatgagcgttttccggaacgcgccaacattggttttatgcaggttgtaagacgtgagcatatccggctgcgagtctatgaacgcggcgcaggggagacccgcgcgtgcggcagcggcgcgtgcgctgccgttgccgtggggattcagcaggggctgctggctgaagaagtacgcgtggaattaccgggcggtcggctggatatcgcctggaaaggtcctggtcatccgttatacatgactggtccggcggcacatatctacgacggatttatccatttatgaagcaaccagaggaagaactacaggaaacgctcacggaactggacgatcgagcggtcgtcgattacctgcgccatcaccctgagttttttatccgtaacgcccatgccgtggaagcgatgcgtgttccacatcccgtgcggggaacggtttcgctcgttgagtggcatatggcccgcgcgcgtaatcacatcaatgtgcttgaagaaaatatgacgctgctgatggaacaggctcatgccaatgaaagcctgttttatcgcttgctgcatctgcaaagccgtctggtcgccgcggatagtctggatgagatgctggtgcggtttcaccgctgggcgcgcgatttggggcttgccggcgcgacgctgcgtttgttcccggatcggtggcgtcttggcgcgccatcgcgctatacgcatctggctttaaaccgtcaggccttcgagccgctgcgtattcaacgactgggacagtcgcagcattatcttggcccgctaaacggcccggaactgctggtggtcttgccggaggcgaaggctgtaggctcggtagctatgtcgatgatgggcagcgatggcgacctcggggtgattctcttcagcagccgtgacccgcaccactatcagccggggcaggggacgcagcttttacaggagatcgcgctgatgctgccggaactgctggagcgctggattaaacgcgtatgacggatgtcgcgctttctcaggatgtctcgcggttcctgcgctatttaggcgtggagcgccagcttagccccattaccgtgcagaactaccagcgtcagcttgatgccattatcgctttagccggagaaaccgggctgaaaagctggcaacaatgtgacgctgcgattgtgcgcagttttgcggtgcgcagtcggcgtaaagggcttggccctgccagtctggcgctacgtctctcggcattgcgaagcttttttgactggttagtcagtcagggcgaattgaaagctaacccggcgaagggcgtctccgcaccgaaagcgccgcgtcatctgccgaaaaatattgatgtcgacgacgttaaccgcctgctggacatcgatcttaacgatccgctcgccgtacgtgaccgggcgatgctggaggtcatgtacggcgcggggctgcgtttatccgaactggttggcctggatataaagcacctcgatcttgataccggcgaagtgtgggtaatgggtaaaggcagcaaagagcgacgcctgccgattggccgtaacgcggtgacgtggattgagcactggctggatctgcgcggcctgttcgccagcgatgaagaggcgttattcctgtcgaagctcggcaagcgtatctccgcgcgcaatgtccaaaaacggttcgccgaatggggcataaagcaggggctaaacagccacgtgcatccacataagctgcgccattcgttcgcgacccatatgctggaatcgagcggcgatctgcgcggcgtgcaagagctgctgggtcatgccaacctttccaccacccaaatttatactcatcttgattttcaacatcttgcttcagtgtacgacgcggcgcatccgcgcgctaaacgggggaaataatgcgtttttaccggcctttggggcgtattgccgcgctcacctttgacctggatgataccctttatgataaccgtccggtgattttgcgtactgagcaggaagcgctcgcttttatgcaaaattatcacccgtcgctacgttcgtttcaaaacgtcgatttacagcggatacggcaggcggtgcgtgaagcggagccggaaatctatcatgacgttacccgctggcgccatcgtgcgatagagcaggccatgcgggatgcgggattatcggcgcaggaggccattgccggcgcgaatgcggcgatgatgcattttgccaaatggcgcagccagattgaggttccgcaggctacccatgagacattacagcagcttgcgaaaaaatggccgctggtggcgatcactaacggcaacgcccagccggaactatttggtctcggcgattactttaagtttgtactgcgcgccggcccggatggacgttccaagccgtttagcgacatgtatttcctggcggcggaaaagctgcatgtgccgatcggcgagatcctgcatgtcggcgacgatctgactaccgatgtggctggcgctattcgctgtgggatgcaggcctgctggattaaacctgaaaatgccgacctgatgcggacgcaggacagccgtttactgccgcatatcgaaatttcgcggttggcatctctcacctcgctgatataatcaccagtagttctgtataaattcccagttattctggcggatggcgctatgcttatccgccctacgataagtagccccggtaagcgaagcgccaccgggcgtttttagttttcatgtttttacgcggcggtgccaatggacgtttcttacctgctcgacagccttaatgataaacagcgcgaagcggtggccgcgccacgtagcaacatgctggtgctggcgggcgcgggaagcgggaaaacccgcgtgctggtgcaccgtatcgcctggttactgagcgtagaaaacaattcgccatactccatcatggcggtgacctttaccaataaagcggcggcggaaatgcgccatcgtattggccagttgatggggaccagccagggcggaatgtgggtagggacgttccacggtctggcgcaccgcctgctgcgcgcgcatcatatggacgctaatttgccgcaggatttccagattctcgacagcgaagatcagatgcgtttgcttaaacgcctgattaaggcgatgaatcttgatgagaagcagtggccgccgcgtcaggcgatgtggtacatcaatagccagaaagacgaagggctacgcccgcaccatatccaaagctatggcaatccggtggaacagacctggcagaaggtgtatcaggcctatcaggaagcgtgcgatcgcgctggtctggtggatttcgccgagctactgctgcgcgctcatgaactatggctgaacaagccgcacatcctgcaacactatcgcgagcggtttactaacatcctggtggacgaattccaggataccaacaacattcagtacgcctgggttcgtctgctggcgggcgataccggtaaggtgatgattgtcggcgacgatgaccagtcgatttacggctggcgcggggcccaggtagagaacatccagcgcttcctcaatgatttccccggcgcgcagaccattcgtctggagcagaattaccgctcgaccagcaacatccttagcgcggcgaacgctctgattgagaataacaatgggcgtttgggtaaaaagctgtggactgacggcgttgatggcgaaccgatatcgctgtactgcgctttcaacgaactggatgaagcgcgctttgtggttaaccgtatcaaaacctggcaggacaacggcggcgcgcttgcgcaatgcgccatcctttatcgcagcaacgcccagtcgcgcgtgctggaagaagcgttattacaggccagtatgccgtaccggatttacggcggtatgcgcttcttcgaacgccaggagatcaaagatgcgctctcttatctgcgtttgattgccaatcgcaacgatgatgccgcctttgaacgcgtggtgaataccccaacgcgcggtatcggcgaccgcacgctggacgtggtgcgccagacctcgcgcgatcgccagctaacattgtggcaggcgtgccgtgaattgttacaggaaaaagccctggccgggcgtgcggccagcgcgctgcaacgctttatggaactgatcgacgctctggcgcaggaaactgccgacatgccgctgcatgtgcagactgaccgggtgatcaaagattccggcctgcgcaccatgtatgagcaagaaaaaggcgagaaaggccagacgcgcatcgaaaacttagaggaactggtgacggcgacgcggcagttcagctacaacgacgaagatgaagatttaatgccattgcaggccttcctctctcacgcggcgctggaagcgggcgaggggcaggcggatacctggcaggatgcggtacagctgatgacgctgcactcggccaaagggctggagttcccgcaggtgtttatcgtcgggatggaagaggggatgttccccagccagatgtcgctggatgagggcgggcgtttggaagaggagcgtcgtctggcctacgtcggcgttacccgtgccatgcagaaactgacgctaacctatgccgaaactcgccgtctgtatggtaaagaggtctaccatcgcccgtcgcgttttatcggcgagttgccggaggagtgcgtggaagaggtccgtctgcgcgccaccgtcagtcgtccggtgagccatcaacgaatgggaacgccgctggcggaaaacgacacaggctacaaactcggccaacgcgtgcgccatgcgaagttcggcgagggaactattgtcaacctggagggcagcggcgagcatagccggttgcaggtggcttttcaggggcaagggatcaaatggctggttgccgcgtatgcgaagctggaaacggtttgaccggctctcatattgccggatggcacctcttatccggcctacgtgctggctaacattttgatttgtaggccggataaggcgaagccgccatccggcgatatattgatgttaatattctgaaatcatagataaatactctcactctgctaacctttctgcataaggggaaattattgctttttcgcgtttcgttgcgtgttgacggcaaatttttgctggcgtaacatgcgcccacgattacgctaagaggacattcgccttggacacacccagtagatactggctcattatcctgtcatccaggatcaactcctaaggctatccctttttgctgatagccttagcggttgtcagcgacctttcattttttcccgtcgcgttgagtcaggctgtttaatggtctgaaacccaatttgtttctgtgtgcccatctgaactgtccgatatttttacgcattgggagtcccggtcatgctgagcgcatttcaactggaaaaaaaccgactgacccggctggaagtcgaggagtcacaaagcctgattgatgccgtatgggtcgatttggtcgaaccggacgacgacgagcgattgcgcgtacaatctgagctgggccagagtctggcgacgcgtcctgaactggaagatatcgaagcatccgcgcgcttctttgaagacgaagacggactgcatatccactccttcttcttcttcgaagatgcggaagatcatgccggtaactctacggtggcattcactattcgcgatggccgtctgtttacgctgcgtgaacgtgaactgcccgccttccgtttgtatcgtatgcgcgcccgcagccaggcgatggtcgacggtaatgcttatgaattactgctcgatctgttcgaaaccaaaattgaacagctagcggatgagatcgaaaacatttacagcgatctggaaaaactgagccgcgtcattatggaagggcatcagggcgatgaatacgacgaagcgctctccacgctggcggagctggaagatatcggctggaaagtacgcctgtgtctgatggatacccagcgcgcgctgaacttcctggtgcgcaaggcgcgcttaccgggcggacagctggagcaggcgcgtgagatcctgcgcgatatcgaatctctgctaccgcacaatgaatcgctgttccagaaggtgaacttcctgatgcaggcggcgatggggttcatcaacatcgagcagaaccgcattatcaaaatcttctcggtggtttccgtggtgttcctgccgccgacgctggtcgcttccagctatgggatgaacttcgagtttatgccggaacttaagtggagctttggttatccaggcgcgattatctttatgattctggcggggcttgcgccgtatctgtactttaagcgtaagaactggttgtaaaatatacggactggcgatttaaccgccagtccgttggaagttcttcatcatgaggaaagttcttgttttgaagaagcgatgaaagatagcagtagtgttgtgagtattacccaggcaatattgagttgtataccaatgttatcgcaatcagccccattgagtgcgacactgactgtacagaagacatttacacctatagacaatgcgatgaaataaagtgccctgcaacctgaatctctgattctcttcgcgccaatattaatatggatataggtattggcaataataaatattaaattaagatattggtttttaggcattatagtaaataatattatccacgatgataatgtataaataacaaattttgctcgcttcaatgtatcccttggggaagggtgaaaaatatctttaataatcctaatcatattattttttccatattgataaccaacttcagatctcacatgtaaatatattacactgaattttctaatgacagcaatggtaattaatgtcatgataattacgctgtacagcaatcgataataattaaatatattatctggtaattaacaatttcaatgaatggatttcataaaatgcaaaagaaaaatttctggcaaatttattttggtaaagaccctttttctaaagccgaattcattaaagcttggattggatggtgggtgattgctattgtcctgctcggtgtactgtcgatttgtacttcattaaatttgagggggattggaatagcgttgggattcggcttttgccagattcatgcccgctatttaacgtttgttggttggaataagtttattggtgtgttgggcgtgtttccagtaacaaatattatattatttattgtattgctatttactaagaagaaataacataaaatggcagccagataatagctgccattttattatttaatgcttacgccgctgcgtataaatcgcatccatcacgaaaatcgccagcgcgacccagataaacgcaaatgtcaccatcttatccgcgcccggcacttcgccataaaacgtcaccgccagtaaaaacatcagcgttgggccgatatactggaaaaagcccagtgtagaaagacgcagacgcgtagccgctccggtgaagcacagcagcggaatcgtagtgaccacacccgccgccattaacagcaagttcaacgatagtgcgttttgtcccatatggctggtagggctatcggcgatgccaaacagataaattgccgcgaccggcaacagccatagcgtttcgaccagcatacccgtctgcgcttcaacggcgatcttcttacgcaccaggccgtaaaacgcaaaactaaacgccagccccagcgcgataatcggcagtgaaccaaacgtccagagttgcaccagcacgccgcacaccgccagaatcaccgccagccactgcattcgacggaagcgttcgccaagaaaaatcatccccagcaagatgttaaccagtggattaatgaaataacccaggctggcctccagcatatggtgattatttaccgcccaaatgaataatagccagttaccgccgaccagtacggcggacagggccagcaggaaaatcttctttggcgttttcagtaagcgcttaacctgtcgccactgccggctgacgctaagcagcgccaccataaagaaaaatgaccaaatcacgcggtgcgtcaggatctcatctgcgcgaacgtaatagatcagcttgaaatacgcgggggcgatcccccaaataaaataggcggcaagagcgagtaatacgccctgccgtgtttgttttgcgtccatccggaaaactcgtatctgaattgtaacaacagtttacctgcttttatcccaccatataagtagcggtggcgctggcgatgtacagctgatcttcattgtgtaattccacgcgggcgacggccactttattccctgcgcgcagcaggctactggtggccgtaaagcggttgcctctgcccggacgcaggtagtcaacgcgcaggtcaatcgttcccatccgcgacaggcgctggcgtagttcatcttcgctgatggtttcgtggcgagttagcgtgctgccgacgcataccagtccggcggcgacatccagcgcagaggcgatcacgccgccgtgtaaaatgctttgcgcccagttgccgaccatcatcggctggttgttgaaggccagttgggcgaacgctttttcatagcgttccagctccagccctaacgcccgattaaacggcatgtggtagacaaacatttcacccactaatttcagagcttgttcagcggtaagtacagcggacatagattcctgacactccattggttaatgaaatgttgatattatgcttcttaattgttgttctctactttaagaagggataactaacggctatgtgtgtaaatatgtaaaaatggttggcagagaatgattcaagctgaaaatacttcgtcaggagaacgtcaagaatgcgggcgattttgagagggttgttgccagccacgctactgccattagcggcatatgcacaagaagctacgataaaagaggttcatgatgcgcctgcagtacggggaagtatcatcgctaacatgctacaggagcatgataacccttttacgctttacccttatgacacgaactacttgatctacacgaacaccagcgatctgaacaaagaggccataagtacctacaactggtctgaaaacgcacgtaaagatgaagtgaaatttcagttgagcctggcgtttccgctgtggcgcggaatactggggccgaactcggtactgggcgcttcctatacgcagaaatcctggtggcagctttccaacagtaaagagtcttcgccgtttcgcgaaaccaactacgaaccgcagctttttcttggttttgctaccgattatcgctttgccggctggacgctgcgcgacgtagagatgggctacaaccatgactctaacggacgttcggaccccacctcgcgtagctggaaccgtctgtatacccgtctgatggccgaaaacggtaactggctggtagaggtcaaaccgtggtacgtgattggcagtaccgacgataatccggacatcaccaaatatatgggttattaccagcttaaaatcggttatcacctgggcgaggcggtattaagcgccaaaggccagtacaactggaatacaggctacggcggcgcggaagttggattaagctatccggtcaccaaacatgtccggctttatacccaggtgtacagcggctatggcgaatcgctgatcgactataattttaatcagacacgtgtcggcgtcggcgtgatgcttaacgatatcttctgattggattgtgttttaaacattgcagtttctctcgcaggcgctgaaaatagcgcctgttttgatttatggtgaacggggttaatgtggcgcaggcggaagtgttgaatctggaatcaggggccaaacaggttttgcaggaaacctttggctaccaacagtttcgcccgggccaggaagcgattattgatactgcgctctccggtcgcgactgtctggtcgtcatgcccaccggcggcggcaaatctctgtgctatcaaatccccgcgttgttgctggacgggttgaccgtcgtcgtttcgcccctgatctcgttgatgaaagaccaggtcgatcagctactggcgaacggggtggcggcggcgtgcctgaactccactcaaagccgcgagcagcagcttgaggtgatggcggggtgccgtaccggacagattcgtctgctgtatattgcgccggaacgcctgatgctggacaactttcttgatcatctggcgcactggaatccggtattgctggcggtggatgaagcgcactgtatctcgcaatggggacatgatttccgtccggaatatgcggcgctcggtcagcttcgccagcgttttcccgctttgccgtttatggcattgaccgccaccgccgacgacaccacgcgcctggatattattcgtctgcttgggcttaacgatccgttaatccagatcagtagctttgaccgaccgaatatccgctacatgctgatggagaagtttaagccgctcgaccagctaatgcgctatgttcaggagcaacgcggcaaatcgggtatcatctactgcaacagtcgggcgaaagtggaagataccgccgcgcgcttgcaaagtcgcggcattagcgcggcggcctatcatgcggggctggaaaacgctattcgcgccgatgtgcaggaaaaatttcagcgcgacgatctgcaaatcgtggtggcgaccgtcgcttttggaatgggcataaacaaacctaacgtacgtttcgtcgtgcatttcgatatcccgcgtaatattgaatcctactatcaggaaacgggccgcgccgggcgcgacggactgcctgcggaagccatgctattttacgatccggctgacatggcctggctacgtcgttgtctggaagagaaaccagccggacagcttcaggatattgaacggcataaactgaatgcgatgggcgcttttgctgaagcgcaaacctgccgccgcctggtattgcttaattactttggcgaaggccgacaagaaccgtgcggcaactgcgatatctgtctcgatccgcccaaacaatatgatggcttaaacgatgcccagattgcgctttctaccattggtcgggttaaccagcgttttggcatgggctacgttgtcgaggtgatccgcggcgcgaataaccaacgcatccgcgatttcggtcatgacaaactcaaggtttatggcatgggacgcgaaaagagccatgagcactgggtgagcgtgattcgccagctcattcatctggggctggtaatgcaaaatattgcgcagcactccgcattacagttgacggatgccgcgcgtccggtactccgtggagacgttccgctaaagcttgcggtgccgcgcatcgtcgccctcaaaccccgcgtgatgcagaaatcgttcggcggtaattacgatcgcaaattgttcgctaagttgcgcaagctgcgtaaagctatcgctgatgaagagaatatcccgccgtatgtggtctttaacgacgccacgttgatagaaatggcggaacagatgccggtttccgccagcgagatgttaagcgttaacggggttgggatgcgcaaactggagcgcttcgggaaagaatttatggcgctcatccgcgcgcatgtcgatggtgatgacgaagagtagtcagcccggcaaaaaagtgccaggatggtgactcactgaactatttccccgcgagccatttttatgatgatgctatttttcaccgtggcaatggtgcacatcgttgcgctaatgagccccggccccgactttttcttcgtgtctcaaactgctgtcagccgttcgcgtaaagaagcgatgatgggcgtactgggcatcacctgcggcgtgatggtatgggcgggcgtggcgctgcttggcctgcatctcatcatcgaaaaaatggcctggctgcatacgatcattatggtaggcggcggcctgtacctgtgctggatgggctatcagatgctgcgcggcgcgctgaaaaaacaggatgcggcggcgtcttctccgcacattgaactggcgcagagcgggcgcagctttctcaaagggctgctgaccaatctgtcgaatcctaaagcgattatctattttggttccgttttttcactttttgtcggcgataacgtcggcgctgcggcgcgctggggtattttcgcgttaatcaccctggaaacgctggcctggtttaccgtagtcgccagcctgttcgcgctgccgaaaatgcgccgtggctatcagcgtctggcgaaatggattgatggctttgccggcgctctgtttgcgggctttggtattcacctgattatttcgcgctaatttacctccgggccggataaacatcatccggcacgactatcacgcgtgtcttgccgacgccaggagcgcgcctaccagcataaacaacgaaccaaacgctttattcagcgccttcatctgctttggtcctttaatccaggcggcaatgcgctgcgccagtgtggcgtaaccggtcatcacaaccatatccaccacaatcgtggtgacgccgagaatgaggtactgcgccagttgcggttgctgcggcatgatgaattgcggaaacagggcggcaagaaagacaatacttttgggattggttagattgacaaatatcgcccgtttgaacagccgaccccgcgattgcgtctgggcgagggtatgcagatcgatagcgcctgcggcgcgccattgctggatacccagccagataagataagccgcgccagcccatttcagaatttcaaaagcgaggagcgagcgcgaaaagagcgtacccagtccgacgcccaccagtacgatatgtatccccagcccggtctggagtccggcgatagaagccactgcgccacgatatccatggttgatagacgtcgtcatggtattgatggcgcctgaacccggagaaagactcagcagagttgaggtcagtagataggcgaaccaccattcaaaggtcatgcgaaactccctggttgtctgtttttgtgccacaatacgctactgccgctgtgttgtgtcaggcacgacgcaaaaaacgattttacctggtaaacgaggccgaaaacccgatgtttcagcagcaaaatgactgggaaacaagagaaaatgcgtttgccgcttttgctatggggccgctgaccgatttctggcgtcagcgggaagaggcggagtttatcggcgtgggtaacattccggtgcgctttgtccgttttcggaatgattctaacgatcggacgatcgtcatttgtcctggccgcattgagagttatgtaaaatacgctgaactggcgtatgacctttttcatctcggttttgatatcttcatcatcgaccaccgtggtcaagggcgctccgggcggatgttatcggacccgcatcggggccacgttgatcattttaacgattatgttgaggacttagcggcgttctggcagcaggaaattgagctggggccgtggcgtaagcgttatatcctggcgcactcaatggggggcgcgatagccaccctgttcctgcaacgccatcgtgtgcggtgcgacgctattgcgctcaccgcgccgatgtttggtattgtgatacgcttgccttcctttatggtgcgccatattctcgactgggccgaggggcaccagcgtatccgtgaagattacgctattggtaccggtcagtggcgggcgttgccgtttgggatgaatgcgctgacccacagccgccagcgttatcagcgcaacttacgattttatgccgacgagccgcagctgcgcgttggcggccccacctggcattgggtacgcgaaggcattctggcgggtgagcaggttctggctggggcgagcgatgacacgacgcctacgctactgattcaggcggaagaagagcgggtagtggataaccgcacccacgatcgtttttgtgaaattcgcgccgcggcgggatacccttgtgaagggggaaaaccgctggttatcaaaggcgcgtaccatgagatcctttttgaaaaggacgccatgcgctcagtcgcgcttaacgccattgttgaatttttcaacaagcctaatttatccagcggaaatcgctttgcttagaggttaaattttattatgtatcaggttgttgcgtctgatttagatggcacgctgctctcccccgaccatacgttgtccccttatgccaaagagactctgaagctgttgaccgcacgcggcatccattttgtctttgccactggtcgtcatcatgtcgatgtagggcaaatccgcgataatcttgaaatcaagtcttacatgatcacctccaacggcgcgcgagtgcacgataccgacgggaatttggtttttacgcataatctggacagcgacattgccagcgacctgttcggggtggtgaatgcgaacccggacatcgtgactaacgtttatcgcgacgacgaatggtttatgaatcgtcatcgccccgatgaaatgcgttttttcaaagaggcggtatttaactactcgctgtttgagcctgcgctgctggagccggagggcgtcagcaaagtgtttttcaccagcgacactcatgaaaagttgttgccgctggagcaggcgattaacgcgcgctggggcgatcgggtaaacgtgagcttctctacgctaacctgtctggaagtgatggcgggcggagtgtcgaaaggtcatgcgctggaagcggtcgctcaggcgatggggtacagcctgaaagagtgtatcgcctttggcgacggaatgaacgacgctgaaatgctcacgatggcgggcaaaggctgcatcatgggcaatgcgcaccagcgtctgaaagacctgtatcccgaacttgaggtgatcggcatcaacgcggataacgccgtgccgcattacctgcgcgatcttttcttacgctgatgtgattgtttgttagttgaccagttgtcaacttcactctccgctacaatgggtgttccctgttttaagagacatccattgtggcgctactcatcattaccactatcctgtgggctttctcctttagtctatttggcgagtatcttgccgggcatgtcgatagctatttcgcggtgctgatacgcgttgggctggcggcgctcgtttttctgccgtttttgcgttctcgcgggcacaacctaaaaaccatcagcctgtatatgctggtgggggcgatgcagcttggcatcatgtatatgttgagcttccatgcttacctctacctgaccgtatccgaactgctgctgtttaccgttctgacgccgctctatatcacgctgatttacgatgtgatgagtcagcgtcgtttgcgctggggctatgcatttagcgcgttgctggcggtgattggcgccgggattattcgctacgatcgcgtgaccgaccatttttgggtcggtttgctcctggtgcagctttctaatatcagtttcgctatcggaatggtggggtataaacgtctgatggagacccgtcccatgccgcagcacaacgcctttgcatggttctatctgggggcgtttttggtggcggcggtggcgtggtcgctgttggggaacgcgcaaaagctgccggaaaccacgctgcaatggagcattctggtgtttctcggcgtggtggcgtccggcattggctactttatgtggaactatggcgctacccaggtagatgccgggacgctgggtatcatgaataatatgcatgttcccgcaggactactggttaatcttgccatctggcatcagcagccccactggccaagctttattacaggcgcggctgtgatcctggcttcgctgtgggtgcatcgaaaatgggtcgctccgcgctccgcacaaacggcagatgatcgcaggcgtgatcccgcgtcgagcgaataaacgcctcggtcaccgcctgacgctggtcgccgtcgcgcacggcggcatacaggcggctccacagaccatcgcccagggttttggtcaccaccagaccctggcgctcaacgctttccaccacccagtgcggcagggcggcaatgcccattctggccgccaccatctgaatcagcagtagcgtattatccacgcttttcagcagcggactggtacccgccggttgcaggaaatgtcgccagacatccagtcggctgcgctgcaccgggtaaatcaacagcgtttcgctggctaaatcttccggcgtaatctgcgttttgctggccagcggatggtcgggcgccagcaccagtcggacttcaaaatcaaacatcggcgaataatgcagcccgctgcgcggcaaaatatccgacgtcatcaccaaatccagctcgccttgttgcaaggccggttgcggatcaaaagtgacgccggatgtgaaatccatttctacctgcggccagcttgcacggaagttttccagcgccggggtcagccactgaatacagctatgacattcaatagcgatgcgcagacgagtttgctgcggttcgttgcacgcctgcagcgcacggctgatttgcggcagcacctggtttgccagttgcagcagaacttccccctgcggcgtaaagcgcagcggctggcttttacgcacgaacaggcggaagccaaggcgttgttccagatcgctgaactgatgagacagagcggattgggtctggtgcagcaccgccgccgcggcagccagcgatccactattccgcaatgcctggagtgttttcagatgtttaatttcgatcatgaaagtccttcacttcgccatgaacaaattgcgcttgaggaatatacagtacctttacattatggatgtgtaaacatccagacgtctaaaactcgtcatatttcgacttgcagatgcgttggcttccttgcttaccccagtcacttacttcagtaagctcctggggatgcgctgtgtcgccgccttcctgcaagccgaactatttagagttttactttcagattcaataaaataagagaggaagtaaaatgacaatattgactcataccctcggttttcctcgcgttggcctgcgtcgcgagctgaaaaaagcgcaagagagctactgggcggggaactcaacgcgtgaagcgttactggcggtaggccgcgaactgcgcgcgcgtcactgggagcagcagaaacaagcgggtattgacctgttaccggtaggcgactttgcctggtacgaccatgttctgaccaccagcctgctgttaggcaatgtgccggctcgtcatcagaacaacgacggttccgtggacatcgacactctgttccgcattggccgcggtcgcgcgccaaccggcgaaccggcggcggcagcggaaatgaccaaatggtttaatactaactatcactacatagtaccggagttcagcaaaggccagcagttcaggcttacctggacacagttgctggaggaagtggacgaagcgctggcgctggggcataagatcaaacccgtactgctggggcctgtcacgtatctgtggctgggtaaagtgaaaggcgagccgtttgaccgcctgacgttgctgaaagacattttgccggtgtatcagcacgtgctggctgagctggcgaagcgtggtgttgagtgggtccaaattgatgagccagcactggtgctggaactgccgcaggcgtggctggatgccttcaaaccggcttacgacgcgctcgccggccaggtgaagctgttgctgacgacctattttgaaggcgtgacgccaaacctggacactattatcgcgctaccggtacaggggttacatgttgacctcattcatggcaaagatgatgtagcggaactgcatcaacgtctgccggtcgactggctgctctccgcaggcttgattaacgggcgtaatgtctggcgcgccgatttgaccgaaaaatacgcgcagattaacgccattgtgggcaaacgcgcgctgtgggtagcatcctcctgctctttgctgcacagcccgatcgatctcagcgtcgaaacgcgtctggatacggaagttaaaagctggtttgcctttgcgctgcaaaaatgcggtgaactggcgttgctgcgcgatgcgctgaacagcggcgaaacggcggcacttgaggaatggagcgcaccgattcaggctcgtcgtcactcccgccgcgtacataatgccgcggtagaaaaacgcctggcggcgatcaccgcgcaggccagccagcgtgagaatccgtatgaggtgcgcgctgaagcgcaacgcgcccgctttaaacttcccgcctggccgacgacgactatcggttcgttcccgcaaaccacggaaattcgcggtctgcgtctggacttcaaaaagggcaacctcgacgcgaacaactaccgcaccggcatcgccgaacatatcaaacaggctatcatcgagcaggagcgtttagggctggatgtgctggtacacggcgaagccgagcgaaacgacatggtggaatacttcggcgagcatctggacggcttcgtctttacccagaatggttgggtgcaaagctatggctcccgctgtgtgaaaccgccggtagtgattggcgatatcagccgtccggcaccgattaccgtggagtgggcgaaatatgcccagtcgctgaccgacaagccggtaaaagggatgttgaccggcccggtgacaattctttgctggtcattcccccgcgaagacgtgacccgcgaaacgattgcgaaacagattgcgctggcgctgcgtgatgaagtcgcggatctggaggcggcggggatcgggattattcagattgacgaaccggcgctgcgtgaaggtttaccgctgcgtcgcagcgactgggacgcctatctggaatggggtgtggaagccttccgcatcaacgcggcggtggcgaaggatgaaacccagatccacacccacatgtgttactgcgagttcaacgacattatggattcgatcgccgcgctggatgcggatgtgatcaccattgagacctcccgctcggatatggagttgctggagtcgttcgaagcgttcgactacccgaacgaaatcgggccgggcgtgtacgatattcactcgccgaacgtgccgagcgtcgagtggattgaagccctgctgaagaaggcggcacagcgtataccggcacaacgcctgtgggtgaatccggactgcggtctgaaaactcgcggttggcctgaaacccgcgcggcgttagcgaacatggtcaaagcggcgcacaatctgcgtcaggcgaaataacccatcctggccgctgcgtttatccggcagcaatgcggcgctaccctttgacgggtagcgcccgtgcctgacctgattaacagcgcctctatctcctcttttttctcatttccctttttcttattttccgcgctgtctttttcaggatctggctatttggcgatcttgataataaaaaggttctccgtatgaatgacaaccaggcggatagcgtccccggaagcagcgcggcggattttattgcctcgcagatcgtttttcctgtcatgatcgcccagcgctctcatagcacaaaacgaggttttccattctgttatgttccctggcgacgataaacgtcgcattgtctcatggcgctggtgaaccttattttttaacggagatgtctgacatggcggtagcaggttgtcacgtaatggccaaacccggcggcgcgatctgcaatattgattgcacatattgcttctatcttgaaaaagaggcgctgtacccggaacgcaataaaaactggcggatgtcggacgagacgctggaacaatttatacgccagcatattgccgcgcagagtggcgaccgcattgactttgcctggcagggcggcgaaccgaccatgatggggctaccgtttttccgccgggttgtcgcattatgtgaaaagtacggcgatgggcgaaaaatcactcatgcgttgcagacgaacggcatcctggtgaatgacgagtgggcgcgctttttcgctgaacagcattttctcatcggtctctctatcgacggcccggcgtcgttacacaaccactatcggcttaatcgcgctggaaaaggaactcatgaacaggtcgtcgcagcaatggcgcggcttaaagcgcaccatgtcgactttaataccttaaccgtcgtgggaaaacataacgtcggtcatgcagcagacgtctacgaatttcttctggcggcgggatcgcgttttattcagtttatcccgctggtggagcgaatgagcaccgataactcatcggtacttaatctggtgatgcccggcgaaagcgcggcaaagctggcgccatggacggtaccgtcgtggcaatatggcgaatttctcaaccagatctttgatatctgggttcgtcgcgacgtagaccgcgtctatgtgcagatgtttgacgtggcgttagccgcctggacggcgcagcagccggtactgtgtgtacattccgagacttgtggacatgccttcgcgttggagtcgaacggcgatctctacaactgtgaccactttgtctacccggagcatctgctggggaatatccaccagcacagcatcaaaaccttaaataatagcgagcgggctattgcgtttggcgaggccaagcgggagaccctgaccgccgattgtcgtcgctgtgactaccgctttgcgtgtcatggcggctgtccgaagcatcgctttgccgtctcgccgtccggtcatcctgcgcataattacttgtgtgcgggctataaacattttttccagcacgttacgccgtatatgaatgtctggcgggagctgctggcgcaaggctatccgatggcatcgatcatgcgctggctggcgcaggacgcgcgtaaagacacaggagccgtcagtcgtaaccatctctgtccctgcggcagcggcaaaaaatataaaaaatgctgtggtaaagcatagctaacgtggcgatgacgatttgttgagcctacaccgactccggtctcgtaggcccaacaaacatcgtaatgcgctgtggttagccttttttcccaccgtactgcgcgaaccattccagcattctttgccagccgtctttcgctgaggcttcgtggtagcccggacgataatcggcattaaacgcgtgccctgcatcgggatagaccacgatttccgccttcgcattagcggcgcgtagcgcctgacgcatggtttccacgctctcctgtggaatactggtatcctgcccgccgtataaacccagtaccggcgcgttaagatcggtggcgatgtcaacgggatgcttcggcgaattgagtgacgtgtcgcccaccagcttgccgtaccacgctaccgccgcttttaactgagggttgtgcgcggcgtacagccaggtaattcggcctccccaacaaaaaccggtgatcatcagcctatgcgcatccccgccgttgcgcgaagcccaactggcgacgtgatccaggtcggcaaggacttgcgaatccggtactttagccaccagcccgctcaataatgtgggtatatcggcgaaatcattggggtcgccttcgcggaaatagagttctggcgcgatagcgagatagccttccagcgccagtcgtcggcaaatatcgcgaatgtgttcatgtacgccaaaaatttcctgtaccacaatgaccacaggcagcgcgccgtcgctcgcttttggtctggcgtaataggctggcatatcgtcgccctgagaggggatcgacgttatccccgcgctaatggccccatcaggcgtatgaatcatcgtaggggcaagtggggaagctgcaggtgcaaagccggatggatgtgtcgttgtcatggtattctccgtacccttaaaaaatagcgcaatcttaactatagacagtgtgtaacaaaccacattgccttaaagcggctatcttttgtgcaatgcttggcgatattgattatttattgtgatgaacatcactttttaatggtaagcgagtgcaattgttttacgtcatagtgatggctgtcacgaaaatatctttatgccttaggtaaagtgtctctttgcttcttctgacaaacccgattcacagaggagttttatatgtccaagtctgatgtttttcatctcggcctcaccaaaaacgatttacaaggggcccagctcgccatcgtccctggcgatcctgagcgtgtggaaaagatcgccgcgctgatggataagccggttaagctggcatctcaccgcgaattcacctcctggcgcgctgagctggatggcaaagcagttatcgtttgctctaccggtatcggcggcccgtctacctctattgccgtggaagaactggcgcaactgggtattcgtaccttcttgcgtatcggcaccacgggggctattcagccgcacattaacgtcggcgacgttctggtaacgaccgcatccgtacgtctggatggggcgagcctgcattttgcgccgatggaattcccggcggttgccgactttgcctgcaccactgcgctggttgaagccgcgaaatcgattggcgccacgactcacgttggcgtaaccgcctcttccgacactttctatccgggtcaggaacgttacgacacctattctggccgcgttgttcgtcgcttcaaaggctctatggaagagtggcaggcgatgggcgtgatgaactacgaaatggaatccgctacgctgttaaccatgtgcgcaagccagggtttacgcgcaggtatggtggcgggcgttatcgtcaaccgtacccaacaagagattccgaatgcggaaacgatgaaacaaactgaaagccacgcggtgaaaatcgtcgtggaagcggcccgtcgtctgctgtaattctcctctcttttgcaaaggccgacgcgttcggccttttctttttgcgtggcgcctcgcaggaaatcccttttaaactggacgtttatacagcacaattctattttgtgcaggacagtgtggttccaggagaggtgttgtgaatattactcttatgataagcgccgtcgtggcgctggcggctggggcggtgattggctggctggcgacgaaagcgcacgccgatcaaatccgcgccgatcttatcgaagaacggcgtgagctggatatcgaacttagcgcggcccggcagcaattagcgcaagaagcgcactggcgcagtgaatgcgagttacttaataacgaactgcgtagcctgcacagtatcaatacctctctggaagccgatctgcgtgaagtcacgacccgtctggaagcgactcaacaacacgcggaagacaaaatccgtcagatgatcaacagcgaacagcgtttaagcgagcagtttgaaaatctggcgaaccgtatttttgaacacagtaatcgtcgcgtagacgaacaaaaccgacaaagcctgaatagcctgctgacgccgctgcgtgagcaactggacggttttcgccgccaggttcaggagagttttggcaaagaagcgcaggagcggcatacgctggcgcacgaaattcgtaatttgcagcagcttaacgcgcaaatggcgcaggaagcgatcaacctgacgcgcgccctgaaaggggacaataaggcgcaaggaaactggggcgaagttgtgctggcgcgggtgctggaggcatccggactgcgtgaaggctacgaatacgaaacccaggtcagtattgagaacgatgcgcgctcgcggatgcagccggatgtcatcgtccgcttgccgcagggcaaagatgtggtcatcgacgctaaaatgacgttggtcgcctacgagcgttactttaacgctgaagatgactacacgcgcgaggccgctttacaagagcacatcgcctcggtgcgcaatcatattcgcttactggggcgtaaagactaccagcagcttcccggcctccgctcgctggactatgttctgatgtttatccccgtagaacccgctttcctgctggcgttagataaacagcccgaactgataaccgaggcgctgaaaaataacattatgctggtaagccccacgacgctgctggtggcgttacggacaatcgccaacctgtggcgctatgaacaccagagccgcaatgcgcagcacatcgcagacagagccagtaagctctacgataaaatgcggttgttcgttgatgatatgtcagcgatcggtcagagtctggataaagcgcaggataactaccgccaggcgatgaaaaaacttgcgtcggggcgtggcaacgttttggcgcaggcggaggccttccgggggctaggcgtggaaatcaaacgcgagattaatccggatttagcggaacaggccgttacgcaagatgaagaatatcgtttacgatcgatccctgaagggcggcaggatgaacattatcccaatgatgaacgggtgaagcagcagttaagttaacccatacggagtagtttagtcctggcgcagagtagggcaaattggcccaatctgttacacttcttgaacatttttatcgataagcaggcactgagatggtggaagattcacaagaaacgacgcactttggctttcagaccgtcgctaaagagcagaaagctgacatggtggcccacgtttttcattctgtggcgtcaaagtacgatgtgatgaatgatttaatgtcatttggcattcatcgtttgtggaagcgcttcaccattgattgcagtggcgtgcgtcgtggacaaaccgttctcgatttagcgggcggtacgggcgatcttaccgcgaaattttcacgtatggtcggggaaactggcaaagttatcctggcggatattaatgattctatgctcaaaatggggcgtgagaagctgcgtaatatcggcgtgatcggcaacgtagagtatgtgcaggcgaatgccgaagctctgcctttccctgataatacgtttgattgcattaccatttcgtttggtttgcgcaatgtaacggaaaaagaaaaagcgctgcggtcaatgttccgtgtgttgaaacccggcggacgtttactggtgcttgaattttccaagcctatcattgagccgctgagtaaagcgtatgacgcctattctttccatattttaccgcgtattggctcgatggtcgcaaacgatgcggatagctatcggtatctcgcggaatccatccgtatgcatcccgatcaggataccttaaaagccatgatgcaggacgccggatttgagagcgtggattattacaatctgacggcgggcgttgtggcattgcaccgtggttataaattctaggagggtggaatgccttttaaacccttagtgaccgcaggaattgaaggtctcctcaatacgtttctgtatcgttcgccagcgctgaaatcagccagaacgcgcttacagggaaaagtactgtgtgtgaaactaaagggattttcgacgccattagtcctggtattcagcgaacgccaggttgatgtgctgggggcatgggaaggcgaagcggactgtacggtaatcactcaagctagcgttttgccaaaactacgcgatcgtcagcagctggccgcgcttattcgcagcggcgaactggaagtgcagggcgatattcaggtcgtgcaaaattttgtggcgctcgccgatctcgccgaattcgatcctgcggagctgttggcgccatacacgggtgatattgcggcggaaagtatcggtaaggccgtgcgtggcggggctaaattcctgcgccacgggtttcaacgccagcagcgttatgccgctgaagcgatcactgaagagtggcgtatggcgcctggcccgctggaagtcgcatggtttgccgaagaaaccgcggctgttgagcgcgccgtagattctctgaccacacggctggaaaaactggaggccaaatgacgccaggtgaagtacggcgcctatatttcatcatccgcacgtttttaagctacggccttgatgaactcatcccccgaatgcgtcttacactgccactccgattatggcgctattcgctgttctggatgccaaaccggcataaagataaattgctgggtgaacgattaagactggcgttgcaagagctgggaccggtctggatcaaatttggccagatgctctccacgcgccgtgacctgttcccgccgcaaatcgccgatcagctcgctttgctccaggataaagtcgcgccattcgatggtcggctggcgaaagcccagattgaagaggcgatgggggggctacctgtcgacgcctggtttgacgactttgatatccagcctttagcgtcggcgtcaatcgcccaggtacataccgcgcgattgaaatcaaacggtaaagaagtggttattaaggtcattcgcccggatattttgccggtaattcaggcagacctgaaactgatttatcgccttgctcgctgggtaccacgcctgttgccggatgggcgtcgtctgcgcccgacggaagtggtgcgtgagtatgaaaaaacgctgatcgatgagctgaatctgctgcgggaatcggccaacgcgattcagttacgccgcaattttgaaaatagtcccatgctgtatatcccggaggtgtactccgattactgtagccagaacatgatggtgatggagcggatatacggcattcctgtttcggatgtggcggcgctggaaaagaacggcaccaacatgaaactgctggcggaacgcggggttaaagttttcttcacccaggttttccgcgacagctttttccatgcggacatgcatccgggaaatatttttgtcagccatgaacaccctgaaaacccgcaatatatcggcattgactgcggtatcgtcgggtcgctaaacaaagaagataagcgttatctggctgaaaactttatcgcgttttttaatcgcgattaccgaaaggtggcagaactgcatgtcgattcaggctgggttccgccagataccaacgttgaagattttgagtttgccatccgcaccgtctgtgaacctatctttgaaaagccgctcgcggaaatctcgtttggtcatgtgttgttaaaccttttcaatacagcgcgtcgatttaacatggaagtccagccgcaactggtgttgttgcagaaaacattattgtatgttgaaggggttgggcggcaactttatcctcagcttgatttgtggaaaacggcgaagccgtttcttgagtcctggatcaaagatcaggtgggtattccggctctcacgcgggctcttaaagaaaaagcgccgttctgggtcgaaaaaatgccagaaatacctgaactggtgtacgacagtttgcgccagggcaaatatttacagcacagtgttgataagattgcgcgcgagttacaggtaaaccatgtgcgccaaagtcagtctcgttatttattgggaattggcgcaacgctgttactgagcgggtcattcttactcgtcaaccgccctgaatggggattgatgcctggctggctcatggtcggcggcgtagttgtctggctggttggctggcgtaaaactcgttgagattttttatcgctcaacgccggttgtgtcacgcaggtacatattatcactcgaggcaatactcaggccgcaagtcaatgtcgtcccggtcgtatgtaaaagtatgtgaatagggcgggcgaaagcggctaacaaagaggcagcgcgaaggataatgtgtataatgcggccctattaattcatcatctatcacagaggaacatgtatgggtggtatcagtatttggcagttgttgattgttgccgtcatcgtcgtactgctgttcggcaccaaaaaactcggttccatcggttccgatcttggcgcgtctatcaaaggctttaaaaaggccatgagcgatgatgatgccaaacaggataaaaccagtcaggacgctgattttaccgctaaatctatcgcggataagcaaggcgaagcgaaaaaggaagacgctaaaagccaagataaagagcaggtataatccgtgtttgatatcggttttagcgaactgctgttagtgttcgttatcggcctcattgtgttggggccgcaacgattgccagtagcggtaaaaacggtagcgggctggattcgcgcgttgcgatcccttgcgacaacggttcagaatgaactgactcaggaactgaaacttcaggagttccaggacagtctgaaaaaagtcgaaaaggcgagtctggaaaatctgactcccgaactgaaagcatctatggatgaactgcgtcaggcggcggagtcgatgaaacgcacctacagcgctaacgatcccgaacaagcgagcgatgaagcgcataccatccataatccggtggtaaaagggaacgaaacgcagcatgagggcgtcacccctgccgccgctgaaacacaggcgagcgcgccggaacaaaagccggagcccgttaaagctaacgtgcctgagtcgacggaaaccgcttccgtagccacgatagacgccgagaagaaatccgctgcgcctgttgtcgaatcttccccctcgtcgagtgataaaccgtaaacatggctgtagaagatactcaaccgcttatcacgcatctgatcgagttgcgtaagcgcctgctaaactgcatcgtcgcagtacttctgatttttctggcgttaatttacttcgccaatgatatttatcatttagtcgccgcaccgctgattaaacagatgccgcaaggggcgacaatgattgcgacggatgtggcgtcgccgttttttacgcctatcaaactcaccttcatggtgtctttgatcttatccgcgcctgtcattttgtaccaggtttgggcctttatcgccccggcgctgtataaacatgagcgtcgtctggtcgtaccgctgctggtatccagttcgctgcttttctacattggtatggccttcgcctattttgtcgtattccctttggcctttggtttcctgacgcatacggcgccggaaggggtacaggtttcgacagatatcgccagctatcttagctttgtcatggcgctttttatggcctttggcgtagcctttgaagtgccggtggcgattgtgttgctgtgctggatgggcatcaccacgccagaagatttgcgtaaaaaacggccttatatcctggtcggggcattcattgtgggaatgctgcttacgccgccagatgttttctcgcaaacgttgctggcgataccgatgtactgcctgtttgaaattggcgttttctgctcacgcttttatgtcggtaagcgacggacgcgcgacgaagataacgaggccgaaaccgaaaaggccgagcacactgaagactaaacacaaccgcccgccagggcggttgtcatatgggggcaagcatgtttgatattggcgttaatttaaccagtagccagtttgcaaaagatcgtgatgatgtggtcgcccgtgcgtttgcggcgggagtaaaaggtatgctactgaccggaacgaacatccatgaaagtcagcaggcgttaaaactggcgcggcgctacccccattgttggtcgacggctggcgtccatccccatgacagcagtcagtggtcacccgcgtctgaagacgccattattgcgctggcgaaccagccggaagtcgtcgctatcggtgagtgcgggctggatttcaatcgcaatttttccacgccgcaggagcaggagcgtgcctttcaggcgcagctacaaattgccgccgaattgcagatgccaatctttatgcactgccgggacgcgcatgagcgatttctggcattgcttgattcctggctggatagtcttcctggtgcaatactgcactgctttaccggttcacgccagcaaatgcaggcctgtgtggatagagggctctatatcggtattaccgggtgggtttgcgacgaacgacgcgggcttgagctacgtgaactcttaccgtttattccagcggaaaagctactgatagaaaccgacgcgccgtatctgttgccccgcgatcttacgccgaaaccaacgtcacgacgcaacgagcccgcgtatctgcctcacatcctggagcgcattgcgctatggcgtggtgaagatccgcaatggttagcggcgatgacagatgccaacgccagaaccttatttgaggtcgtattctgaacgatagctaaatcttgcgaaaaccggtgttttttacgctctgcttcacttctttattgagtaaattaagcagtaacatcgaacgcgtttcgccatccggttcggtaaaaatcgctttcagcccttcaaatgcgccttccgtgatgatgacgctatcgccgggatagggggtttcaggatcgacaacgccttcgggcttgtagatagaaagctgatgaataacgctggaaggcacgatcgcaggatgcgcgccaaagcgcacaaaatggctgacgccgcgcgtggcgttgattgtagtggtatgtatcacttccggatcaaattcaacgaacagataattaggaaagagcggttcgctgacggaggtacgttttccgcgtaccattttttccagggtgatcatcggtgtcaggcaacttaccgcttgtctttcgaggtgttcctgagcacgctgaagttgcccgcgtttgcagtacagtaaataccaggattgcataatgactcttatccgcttgttcggggcgcaagcatagcaaaagccatgcgcgaagttaattatacacttcatcctttaagccgtatctggattagcgttggttgccagagttcacgctaatttaacaaaaatacagcatcccgatgatgaacgccgtataatgatgcgcttaccaagaggctacaatggacgccatgaaatatcacgatttacgcgacttcctgacgctacttgagctgcagggggaactaaaacgcatcacgctacctgtggatcctcatctggaaatcacggaaatcgctgaccgcacgctgcgtgccggtggaccggcgttgctgtttgaaaatcctaaaggttacgccatgccggtgctgtgcaacctttttggcacgccaaaacgcgtggcgatgggcatggggcaggatgatgtttccgccttacgggaagtgggtaaattattagcgtttcttaaagaacctgagccgccgaaaggctttcgcgatctgtttgacaagctgccgcagtttaagcaagtgctgaatatgccgacgaaacggttacgcggcgcgccttgccaacagaaaatcgcgtctggcgatgatgtcgatttaacgcgtcttcctgtcatgacctgttggccggacgacgccgcgccgctgattacctggggactgacggtaacgcgtggcccgcacaaagaacggcaaaacctgggcatttatcgtcagcagttgataggtaaaaataagcttattatgcgctggctgtctcaccgaggcggcgcgctggattttcaggagtggttagccgcgcgtccgggtgaacgtttcccggtctccgtcgcattgggcgccgatccggcgacgatacttggcgccgtgactcctgttcccgatactctgtcggagtatgcctttgcgggcctgctgcgcggcacgaaaactgaagtggttaaatgcctttctaacgatctggaagtgcctgccagcgccgagattatccttgaaggttacattgagccgggagagatggcgccggaaggaccgtatggcgatcatacgggctattataatgaagtggataactttccggtctttaccgtcacgcatattacgcagcgtgaggatgccatctatcactccacctataccgggcgtccgcccgatgagcctgcggtattaggggtggcgctcaatgaagtcttcgtgcctattctgcaaaaacagtttccggaaatcgtcgacttttatctgccgccggaagggtgttcttaccgcctggcggtagtgacgatgaaaaagcagtacgctggtcatgcgaaacgcgtcatgatgggcgtctggtcgtttttgcgccagtttatgtatacgaagtttgttatcgtttgcgatgatgacgttaacgcacgcgactggaatgatgtgatctgggcgattaccacccgtatggaccctgcgcgggatacggtgctggttgaaaatacgccgattgactacctggattttgcctcgccggtctccgggctgggttcaaaaatggggctggatgccacaaacaaatggccgggcgaaacccaacgcgagtggggtcgtcctattgttaaagatcctgaagttaccgcgcgtattgatgcgatttgggatgagctggctatctttaaataactgaaagcggacatcgacatttcaggctgcggcgactcggcttgaaaaatgtcggtattgacccgacacccgacagagggagcgcatgacaaccttaagctgtaaagtgacctcggtagaagctatcaccgataccgtatatcgggttcgtttagtgccggacgcggcgttttcattccgcgctggtcagtatttgatggtcgtaatggacgagcgtgacaaacgcccgttttcgatggcttcaacgccggacgagaaagggtttattgaattacacattggcgcttccgagctcaatctgtatgcgatggcggtcatggatcgaattctgaaagaccgggaaatcgtcgtcgatattccgcatggcgacgcctggctacgtgacgatgaagagcgtccgttgattctgatcgcgggcggtacgggcttttcttatgtgcgctccatcctgttgacggcgttagcgcgcaacccgaaccgcgatgttaccatttactggggtggtcgcgaagaaaagcacctctatgatctctctgagctggaagcactctctgttaaccatccgaatttgcgtattgaacctgttgtcgagcagccggaagaaggctggcgtggacgtacaggaacggtacttacggcggtattgcaggattatggtacgctggcggggcacgatatttatattgccggacgttttgagatggcgaaaatcgcccgcgatctgttctgtcatgagcgtaacgcgcgggaagatcgtctgtttggcgatgcgttcgcatttatttaactattttatgggacgcagtagcgtccctttttacgttagcctacctaaaagtcctcttaaatattaattaatcgtcaactataaaaccttatgatattgaatatctacaggctttgtattgcgtgtaataaattaagtaatattatgtcctgaggctatcaataaaaatagttaattatatatgcttcatttatttttataaaagaaacataaaatggaaagttagttatttatttataagatggagagtgttatgaaatttaaatatgctttaacttctctcgcattatctgttgcaattttgtcatcagtaccttctactgctttcgccatcggcggcgccagcggcgctaaagtggactatcaggtccagggaaaaattggcgaagttgttatgaacccctatgatatcgcgccgctaaccgccgttattcgtaatggcggttaccagttacgtgacgtgcatgtacggattgtccccaaagaaaatggccaggagatcgcgtataaagttaataataaataccttttaacgtatggcggtatccccgtctttggtctttacccagattatgtcaataccgttgaagttgaatatacaaggatccagggtagtaaaaccgaaaatataaaagaaagctataaaatgtatgcaccgcctgcctatattgaatcagcgggtacaaaagaagaacaatcagcactctttactatcgatgttaaaaaggtttccccagaatttaaagatcgcttgtatcttttgaataatacgaaagataagtctgggaatggaacgcgtactgtctggaacaaccctactgggggtgcattagaatggaacttcactacagctaacgctattatcgacacctccggtgatattcgttggtttatgaatccaagttcaatttatgatttaaagtcaatttatcgtgctggcgttatgatgggctttaaacaaaaccaggatggcgcactatcgtggggctacggtcagcgttatgtgaaatacgatatcatggggcgtgaaatctttaaccgccgcctgccggataattataacgatttttcacactcaatggataacgcggccaacggtcactacttcctgcgtgtagccagctctaactataaacgccctgatgggaaaaatgttcgtaccgtgcgtgatgtgattgccgaagttgatcagaacggcgtggtagtggatgaatggcgtctgtttgatatcctcgatccttatcgtgatgtgataatgaaaaccctcgatcagggcgctgtgtgcctgaatatcgacgccagccagtccggccatacgttgagcgaagaagatctggcggcgctggactcctccgacaaattcggggatatcgtgggtagtggggctggccgcaactgggcgcatgtcaacagcgtcgactatgacagtgaagatgattccatcatcatcagctcccgccaccagagtgcgattatcaaaatcggccgcgataagaaagtgaagtggatactgggtacgcctgctggctggaaagcgccatttaatgccgcaattctgacgcctgtggatagcaaaggccaaaaaatcgcctgccaggacagtggctgcgagggtgacttcgactggacatggacgcaacatacggcctttaaaattgatagtaagagtaaaggcgatatcttatacctttccgctttcgacaatggcgatggccgcggcttagaacagcctgctatgcagagtatgaaatacagccgctccgtgatttacaaaatcgaccagaaaaacaagacagtccaacagatctggcaatacggtaaagagcgcgggaacgagtggtttagcccggtaacctctatcaccgagtaccagactgacaagaattctgtgttcgtgtattccgcaacagcaggtggtgcgtttgatttatcggtaggcgcatttaccagcttgcctaatccgtatctggaagagttcaaatggggagaaaaagagcctgcggttgaaatgcaaatacatggtgcgcgtggatatcaggctatgccatttagcctgaccaaagcgcttactgagtagagcgggccatacggtgaaaaaacccgcccctgacgggcgggaaaaacggcaactaaactgtttcccgtcataattcgcgcagcctctttgttggctgcctttgctcaccccgggcacatagttatctatgtgcccggggattcgctcagttgccgctgcgctgcaatgcgagttatttaggggatattatctttgattaaacccgctcaaacaccgtggcgatgccctgacccagaccaatacacatcgtcgccagaccaaactgtgcgtctttgcgctccatcaggttgataagcgtggtgctgatacgtgctccggagcagccgagcggatgaccaagcgcgatcgcaccgccgttgaggttgatcttctcgtctatctgctccatcaatcccagatccttaatgcatggcaggatctgtgcggcaaacgcttcgttcatctcaaacacatcgatatcgctggctgacagtcccgcttttttcaacgccagttttgacgccggaaccggcccgtaacccataattgacggatcacaacccaccactgccattgagcgaatacgggcgcgaggtttcaggcccagctcacgggcacgactttcgctcattaccagcatggcggctgcgccatcggaaagcgcggatgaggtgcccgccgtgaccgtgccactaaccggatcaaatgccggacgcagcgttgatagcgcttcgaccgtggtttccgggcggatcacttcatcgtagctaaactgcttcaacacgccatcggcatcatgaccgccagtcgggataatctccgttttgaatgcgccagactgggtggcggcccaggcgcgagcgtgagaacgcgcggcgaactggtcctgcatttcccggctaatgccgtgcaggcgggagagcatttccgccgttagccccatcatccctgccgctttggcgacgttgcggctcagacccgggtgaaaatccacgccgtggctcatcggcacgtgccccatatgctccacgccgccaaccagacaaacctgcgcatcgccggtcatgatcattcgcgctgcatcgtgtaacgcctgcatcgaggaaccacacagacggttgacggtgaccgccggtaccgaatggggaatttctgccagcagcgcggcgttacgggcaatgttgaagccttgctccagcgtttgttgtacgcagccccagtaaatatcatcgagggtcgccgctgtaagcgacggattacgcgccagcaggctacgcattaagtgggcggagagatcttctgcccgcacgttgcgaaacgcgccgcccttcgaacggcccatcggggtgcgaatagcatcgacaatgacaacctgttccattgtgactccttaagccgttttcagagaaccaaccggacgggctggttcaaccgggggataatacggttcgttatggcgcgctttattacgcagcccttccggcacttcatacagcgggccgaggtgttgatactgctgcgccatatcaagatatttcgcgctgccctgtgtatccagccagcggaatgcgccgccgtggaacggagggaagcccaggccgtagaccagcgccatatcggcttccgccgggcttgcgataatgccttcttccagacagcgaaccacttcgttaatcatcgggatcatcatacgggcgattatctcgtcgtcgctgaagtcgcgtttcgtctgactgacgcttgccagcaggtcatccaccgcagcatcttcttctttcttcggcttacccttgctgtcttctttatagcgccagaagcccagaccgtttttttgcccaaaacggctggcgtcaaacaatgcgtcgatcgcgtcgcgatactctttctgcatccgttgtgggaagcctgccgccattaccgcctgcgcgtggtgggcggtatcaatacccaccacgtcgagcagataggccgggcccatcggccagccgaactgtttttccatcactttatcgactttgcggaaatccgcgccgtcgcgcagcagttgactgaaaccggcgaaataggggaacagcacgcggttaacaaagaagccggggcagtcgttgactacaatcggcgtcttgcccattttgctggcccaggcgacgactttggcaatggtttcgtctgaactcttctcgccgcgaatgatttcaaccagcggcatccggtgtaccgggttgaagaagtgcattccgcaaaagttttccggacgttccagggcgcttgccagttcgccaattgggatggtggaggtatttgaggccagcacggtttccgggcgcactttctgctcggtttccgccagtaccgcttttttcactttcggattttcgactaccgcttcgacaacagcatctacgcgatcgaaaccggcataatcgagagtcgggtggatggtcgaaatgacgcccgccagcttcagaccgtcgatcttgccgcgctccagctgtttgttcagcagcttggccgcttcggtcatgccgaggttcaacgatttatcgttgatatctttcatgatgaccggtacgcctttccaggccgactggtaagcgataccgccgcccataatgcccgcgcccagtacggctgcctgtttcggcgtctcaatatctttggtcagctttttggctttaccttttacatattgatcgttgaggaagataccgaccagcgcacgagcctcattggtatgcgccagcggaacaaagcttttattttccagattcagcgcttcttcacgaccaaaacgcgcggcggcttcaatggttttcactgcggtcatcggcgccggataatgtttacccgccgtttgtgcgaccatgcctttagcgatggtaaagctcatcgccgcttcaatcttactgagtttcaacggttccagtttcggctggcgtttagctctccagtcgagatcgccggtaatggcctggcgtaacaccgctatcgcgccttcaattagcttctcttgtttgaccacgccgtccacaaggccgattttcagcgcgtgctcagcaccgacatctttacctgccgcgataatctccagcgcgctgtctgcgcccagcatacgcggcagacgaacggagccgccgaaacccggcatgatgcccagtttagtttccggcagaccgatacggaggtctggcgtcgccagacggtaatcggtggccagcacgcattcgcacccgccgcccaacgcatagccgtttacggcggcaagggtcggtacgggtaaatcttccagacggttaaagacgctattagcgaaatgcagccattggcttaactgctcttcggggacgaggaacagtgaaagaaattcggtgatgtccgcgccgacaataaaggccgctttattagagcgcagcagcagcccttttaaatcgtgttgcttttccagcacctcaagcgcctggccgaggctggcgacggttgcggtgtcgagtttattgaccgagcctggagcatcgaacaccagttcggcgatgccatcttccagccagtcgaggtacagggtgtcgcctttataaagcatgtcagtctcctgaatccacaaggtgatctggtcgtaccagatgaagcgaagtgtgtattttgtgttaataaaatgcaaataaatgattgaagaaatgccgatgtgatcacgctcggcagagatcacgctctcgtggggcgatgtgctaagatgcggaaacttgaggtcaaaaaaacagaagggtaaaaaatggaatcactggccgcgctctataaaaatcatattgttaccttacaagaacggacgcgcgatgttctggcgcgctttaagctggatgcgttacttattcattccggcgagcttttcaacgtctttctcgacgatcacccttatccgtttaaggtcaatccgcagtttaaagcgtgggtgccggtaactcaggttccaaattgctggctgctggtcgatggcgtcaacaaacccaaattgtggttttatctgccggtcgattactggcataacgttgaaccgctgccaacgtcattctggacagaagaagtcgaggtcgtcgccttaccgaaagcggatggcatcggcagccaactgcctgccgcgcgtggcaatatcggctatatcggcccggttcctgagcgcgcgctacaattggatatcgccgccagcaacatcaacccgaaaggtgttatcgactatctgcattactaccgcgcctataaaacggattatgaactggcctgtatgcgcgaagcgcagaaaatggcggtgagcggtcatcgggcggcggaagaggccttccgttccggcatgagtgagttcgacatcaacctggcgtacctgaccgccacgggacatcgcgatactgatgttccatacagcaacattgtggcgctgaacgaacatgccgccgtgctgcattacacgaaactggatcatcaggcaccgtctgaaatgcgcagtttcctgctggatgcgggcgcggaatacaatggctacgcggcggatctgacgcggacctggtcggcgaaaagcgataacgactacgcccacctggtgaaagatgttaacgacgaacagttggcgctgatcgctaccatgaaggcgggcgtcagctatgtggattatcatattcagttccatcaacgtatcgcgaagctgctgcgtaaacatcaaatcattaccgacatgagtgaagaggcgatggtggaaaatgatcttaccgggccgtttatgccgcacggtattggtcatccgttgggtctgcaggtacacgatgtggccgggtttatgcaggatgattccggtacgcatctcgctgcaccgtccaaatacccgtatctgcgctgcacgcgtgtgttacagccgcgaatggtgttgaccatcgaaccggggatttacttcatcgaatcgctgttagcgccgtggcgcgaaggcccgttcagcaagcacttcaactggcagaaaattgaagcgctcaagcctttcggcggtattcgcattgaagataacgtggtcatccacgaaaacggcgtggaaaacatgacgcgggatttaaaactggcgtaatggacagttggttaatccctgcagcgccggtcaccgttgttgaagagatcaaaaaaagccgctttattacgctattggcgcataccgatggcgtagacgcggcgaaagcgtttgttgagtcagtcagagctgagcaccctgatgcgcgccaccattgtgtggcgtgggtggcgggtgcgccggacgactcacagcaactgggcttttcagacgacggcgaaccggcgggaacggcaggcaagccgatgcttgcgcaattgatgggcagcggcgtcggagaaattactgccgtcgtcgtgcgctactatggtggtattctgctgggtacgggcgggctggtaaaagcctatggcggcggtgtgaatcaggcattacgtcagcttgccacacaacgcaagacgccattaaccgaatatactttgcagtgtgagtacggtcagttggccggaatcgaagcattattaggacagtttgccgggaagatcgtttccagcgattatcaggcgtctgttcggctcagggtggcgcttccttttgctcatgtgaatgcattttccacaaaactggcggattttagccgtggttcattgcaattgttagcgattgaagaataatccccacctcatttttaagaataaaggaagcggcagagatgcattttcgcgccattacccgaatcgttggactactggttatcttattttcggggacaatgattctcccgggactggtagcgctaatatatcgtgatggcgcaggaagagcgttcacgcagaccttttttgtcgcgctggcgatcggttccatactgtggtggccaaaccgtagggaaaagggcgagctgaaatcccgcgaaggatttcttatcgtggtgctgttctggaccgtgctgggcagcgtgggtgcgctgccgtttattttctcggaaagcccaaacctcaccattaccgatgctttttttgaatcgttctccgggttaaccaccacgggcgccactacgctggtggggctggactcattaccgcacgccattctcttttatcgtcagatgctgcaatggtttgggggtatggggatcattgtgctggcggtggcgattctccctatcctcggcgtcggggggatgcagctctatcgggcggaaatgccggggccgctcaaagataacaaaatgcgcccgcgtattgccgagacggcgaaaacgctgtggcttatctatgtcttgctaacggtagcctgcgcgctggcgctatggtttgcagggatgcccgcgtttgacgctatcggacacagcttctccactatcgctatcggcggcttctcaacgcatgacgccagcgtaggctattttgatagtcccactattaataccatcatcgctattttcctgctgatctccggttgtaactatggcctgcatttctctttattaagcgggcgtagcctgaaagtatactggcgcgatccggaattccgcatgttcatcggcgtacagttgacgctggtggtgatctgcacgctggtactgtggttccataatatctacgactcggcgctgacaacgctaaatcaggcattcttccaggttgtgtcgatggcgacaacggcagggtttaccacggacagcattgcgcgctggccgctgtttttgcccgtcttgctgctatgttccgcgtttattggcggttgcgccgggtcaacgggcggggggttaaaggtcatccgtattctgttgttgtttaaacaggggaaccgcgaactcaaacgtctggtgcatccgaatgccgtttacagtattaagctggggaaccgggcgctgccagaacgtattctggaagccgtctggggattcttttctgcctacgcgctggtatttatcgtcagtatgctggccattatcgctacaggcgtagatgatttctcggctttcgcctcggtagtggctacgcttaataacctgggaccggggctgggggtggttgctgataacttcgccagtatgaatccggttgcgaaatggatactcatcgccaacatgctatttggtcgtctggaagtattcactttgctggtactttttaccccgactttctggcgtgaataatggagtaacacgtgaaaacattgattcttttctctacccgggacggacaaacgcgcgaaattgcctcttatctggcttctgaactcaaagagatggggatctgggccgatgtcgttaatctgcatcgcgcagaagagccggactgggatagctatgatcgcgtagtgattggcgcgtctattcgttatggtcattaccacagcgcctttcaggagtttgttaagaaatatgccacgcggttgaacggaatgccgagcgccttttattccgttaacctggtggcgcgtaaagctgaaaaacggacgccgcagactaacagctacgcgcgtaagtttttaatgagctctccgtggcgacctgactactgtgccgtcattgcaggcgcgcttcgctatccccgctatcgctggtatgaccgtctgatgatcaagcttattatgaagatgtcgggcggcgaaacggataccagtaaagaagtggtgtacaccgactgggagcaggttgcgcactttgcccgtgaaatagcccatttaaccaacaaatcgtcggcaaaataaacgcaaagaataaaaagtgcgcactcagaaaattattttaaatttcctcttgtcaggcagaaataactccctataatgcgccaccactgacacggaacaacggcacacaggccgccgggtcagcggggttcagaccagaacctcacggagaaaagcgaaaataaacgcttgactctgaagcgggaaagcgtaatatgcacaccccgcgccgctgagaaaaagcgaagcggcactgctctttaacaatttatcagacaatctgtgtgggcactcgaagatacggattcttaacgtcctcggacgaaaaatgaataccaagtctcaagagtgaacacgtaattcattacgaagtttaattctttgagcatcaaacttttaaattgaagagtttgatcatggctcagattgaacgctggcggcaggcctaacacatgcaagtcgaacggtaacaggaagcagcttgctgcttcgctgacgagtggcggacgggtgagtaatgtctgggaaactgcctgatggagggggataactactggaaacggtggctaataccgcataacgtcgcaagaccaaagagggggaccttcgggcctcttgccatcagatgtgcccagatgggattagcttgttggtgaggtaacggctcaccaaggcgacgatccctagctggtctgagaggatgaccagccacactggaactgagacacggtccagactcctacgggaggcagcagtggggaatattgcacaatgggcgcaagcctgatgcagccatgccgcgtgtatgaagaaggccttcgggttgtaaagtactttcagcggggaggaaggtgttgtggttaataaccgcagcaattgacgttacccgcagaagaagcaccggctaactccgtgccagcagccgcggtaatacggagggtgcaagcgttaatcggaattactgggcgtaaagcgcacgcaggcggtctgtcaagtcggatgtgaaatccccgggctcaacctgggaactgcattcgaaactggcaggcttgagtcttgtagaggggggtagaattccaggtgtagcggtgaaatgcgtagagatctggaggaataccggtggcgaaggcggccccctggacaaagactgacgctcaggtgcgaaagcgtggggagcaaacaggattagataccctggtagtccacgccgtaaacgatgtctacttggaggttgtgcccttgaggcgtggcttccggagctaacgcgttaagtagaccgcctggggagtacggccgcaaggttaaaactcaaatgaattgacgggggcccgcacaagcggtggagcatgtggtttaattcgatgcaacgcgaagaaccttacctggtcttgacatccacagaagaatccagagatggatttgtgccttcgggaactgtgagacaggtgctgcatggctgtcgtcagctcgtgttgtgaaatgttgggttaagtcccgcaacgagcgcaacccttatcctttgttgccagcggttaggccgggaactcaaaggagactgccagtgataaactggaggaaggtggggatgacgtcaagtcatcatggcccttacgaccagggctacacacgtgctacaatggcgcatacaaagagaagcgacctcgcgagagcaagcggacctcataaagtgcgtcgtagtccggattggagtctgcaactcgactccatgaagtcggaatcgctagtaatcgtggatcagaatgccacggtgaatacgttcccgggccttgtacacaccgcccgtcacaccatgggagtgggttgcaaaagaagtaggtagcttaaccttcgggagggcgcttaccactttgtgattcatgactggggtgaagtcgtaacaaggtaaccgtaggggaacctgcggttggatcacctccttaccttaaagaactgttctttgaagtgctcacacagattgtctgatgaaaaacgagcagtaaaacctctacaggcttgtagctcaggtggttagagcgcacccctgataagggtgaggtcggtggttcaagtccactcaggcctaccaaattttccctgaatactgcgttgtgaaataactcacatactgatgtatgcttcgttattccacgccttgtctcaggaaaaattatcggtaaagaggttctgactacacgatggggctatagctcagctgggagagcgcctgctttgcacgcaggaggtctgcggttcgatcccgcatagctccaccatctcgtgagtgtttacgaaaaaatacttcagagtgtacctgaaagggttcactgcgaagttttgctctttaaaaatctggatcaagctgaaaattgaaacacagaacaacgaaagttgttcgtgagtctctcaaattttcgcaacacgatgatgaatcgaaagaaacatcttcgggttgtgaggttaagcgactaagcgtacacggtggatgccctggcagtcagaggcgatgaagggcgtgctaatctgcgataagcgccggtaaggtgatatgaaccgttataaccggcgatacccgaatggggaaacccagtgtgactcgtcacactatcattaactgaatccataggttaatgaggcgaaccgggggaactgaaacatctaagtaccccgaggaaaagaaatcaaccgagattcccccagtagcggcgagcgaacggggaggagcccagagcctgaatcagcatgtgtgttagtggaagcgtctggaaaggcgcgcgatacagggtgacagccccgtacacaaaagcgcatgtgctgtgagctcgatgagtagggcgggacacgtggtatcctgtctgaatatggggggaccatcctccaaggctaaatactcctgactgaccgatagtgaaccagtaccgtgagggaaaggcgaaaagaaccccggcgaggggagtgaaaaagaacctgaaaccgtgtacgtacaagcagtgggagcacaggtttacctgtgtgactgcgtaccttttgtataatgggtcagcgacttatattctgtagcaaggttaaccgaataggggagccggagggaaaccgagtcttaattgggcgttaagttgcagggtatagacccgaaacccggtgatctagccatgggcaggttgaaggttgggtaacactaactggaggaccgaaccgactaatgttgaaaaattagcggatgacctgtggctgggggtgaaaggccaatcaaaccgggagatagctggttctccccgaaagctatttaggtagcgcctcgtgaattcatctccgggggtagagcactgtttcggctagggggccatcccggcttaccaacccgatgcaaactgcgaataccggagaatgttatcacgggagacacacggcgggtgctaacgtccgtcgtgaagagggaaacaacccagaccgccagctaaggtcccaaagtcatggttaagtgggaaacgatgtgggaaggcccagacagccaggatgttggcttagaagcagccatcatttaaagaaagcgtaatagctcactggtcgagtcggcctgcgcggaagatgtaacggggctaaaccatgcaccgaagctgcggcagcgacactgtgtgttgttgggtaggggagcgttctgtaagcctgcgaaggtggcctgtgagggttgctggaggtatcagaagtgcgaatgctgacataagtaacgataaagcgggtgaaaagcccgctcgccggaagaccaagggttcctgtccaacgttaatcggggcagggtgagtcgacccctaaggcgaggccgaaaggcgtagtcgatgggaaacgggttaatattcccgtacttggtgttactgcgaaggggggacggagaaggctatgttggccgggcgacggttgtcccggtttaagcgtgtaggtgtgtgttccaggtaaatccggttcactttaacactgaggcgtgacgacgaggcactacggtgctgaagcaacaaatgccctgcttccaggaaaagcctctaagcatcaggtaacatcaaatcgtaccccaaaccgacacaggtggtcaggtagagaataccaaggcgcttgagagaactcgggtgaaggaactaggcaaaatggtgccgtaacttcgggagaaggcacgctgacacgtaggtgaagtgatttactcatggagctgaagtcagtcgaagataccagctggctgcaactgtttattaaaaacacagcactgtgcaaacacgaaagtggacgtatacggtgtgacgcctgcccggtgccggaaggttaattgatggggtcagcgcaagcgaagctcctgatcgaagccccggtaaacggcggccgtaactataacggtcctaaggtagcgaaattccttgtcgggtaagttccgacctgcacgaatggcgtaatgatggccaggctgtctccacccgagactcagtgaaattgaactcgctgtgaagatgcagtgtacccgcggcaagacggaaagaccccgtgaacctttactatagcttgacactgaacattgagccttgatgtgtaggataggtgggaggctttgaagtgtggacgccagtctgcatggagccgaccttgaaataccaccctttaatgtttgatgttctaacgtggacccgttacccgggttgcggacagtgtctggtgggtagtttgactggggcggtctcctcctaaagagtaacggaggagcacgaaggttggctaatcctggtcggacatcaggaggttagtgcaatggcataagccagcttgactgcgagcgtgacggcgcgagcaggtgcgaaagcaggtcatagtgatccggtggttctgaatggaagggccatcgctcaacggataaaaggtactccggggataacaggctgataccgcccaagagttcatatcgacggcggtgtttggcacctcgatgtcggctcatcacatcctggggctgaagtaggtcccaagggtatggctgttcgccatttaaagtggtacgcgagctgggtttagaacgtcgtgagacagttcggtccctatctgccgtgggcgctggagaactgaggggggctgctcctagtacgagaggaccggagtggacgcatcactggtgttcgggttgtcatgccaatggcactgcccggtagctaaatgcggaagagataagtgctgaaagcatctaagcacgaaacttgccccgagatgagttctccctgagacttaaagtctcctgaaggaacgttgaagacgacgacgttgataggccgggtgtgtaagcgcagcgatgcgttgagctaaccggtactaatgaaccgtgaggcttaaccttacaacgccgaagatgttttggcggatgagaagacgattttcagcagtgattcagagttgagtacgcaatactttgcgcagcagcaaggcggcaagcgaaggaaaggaaggagcatacagaagtatgtgactgagtttacgagcgcaggcaacgccgctgatgcgataaagaattgcgtacagagcacaaagaatttgcctggcggcactagcgcggtggtcccacctgaccccatgccgaactcagaagtgaaacgccgtagcgccgatggtagtgtggggtctccccatgcgagagtagggaactgccagacatcaaataaaacaaaaggctcagtcgaaagactgggccttttgttttatctgttgtttgtcggtgagtagtctcctgaggaggacaaatccgccgggagcggatttgaacgttgcgcagcaacggcccgtagggtggcgggcaggacgcccgccataaactgccaggcatcaatttagtgaagaagcccatccgtcaggatgggcttttttgcgtgtgcggtaactgtaaaaatgtaggcctgataagtgcagcgccatcaggcaaccggcaccgccggatggcggctccgccttattcggcctacaaggaacgtgctttctctaaccaccgcaaaatgaaggcagaaatctgcgatacatcattaagatccaaaacgggtaccgctacggcaagtggaatatcactggcaactgcaataacatgctcatcaagaattaattcttcctcgctgtgcccacatccctgacgaaaaagtaagatcttcgcaactgcctcgtgtttaaacccttctaccagcaccatatccagctttgatgcatccatccggctcaccagccatgccagatccaactcttcttgccccggcgtttcagtcattaacgcccagcgctgctgactggcaaccagcgtctgtgccgccccggctttacgcagctcgtagctatctttacccggtttatcgacatccatatcatgatgggtatgcttaatcagccctggccgaattccatgctcacaaagtgctgggatcagttttttcagcagtgttgtttttcccgtgccgctccatgcggcaatggcgagtagcggtatcatggtctcttttgccattgcgcgagttcctccggcgtgttgacgttcacaaatgcctccttacaatcgctgaaatcaacggcgtgtccgcctacctggcgcataaaaatcattacccgccgctcgcctgcttgcaaataagctgtcaactggggctcaacggcacgattaatcaacgcgatcgttggatgatcgcgctctccatcatgaacccaaaccacgggtgcgccatgacgctgcgctgctaaacgatcgaccaggttgtgggggatacagggattgtcacagggacaaaacagaaaccagtcgcttgctacctgctgaaaaacggaaagcatacccgccagcggaccgggaaagtcagcgattgaatccggaatgactttcaggccgctggcctggtagatatccagatggcgattagcactaatgacgaccgttgcaagttgtggcgcgagcgcgtcggcaacgtgtcgccagagcggtttcccgttcagttcaagcagacctttatccgcacctcccatccgccgggctttaccgcctgccagcaccacgccggttattacttcatccagattcaccgatatcgcctcttttattgtgggattgaccctgctaccgtgtctgtatcaagaataaggagcacagctatgaaatgtaaacgcctgaatgaagtcattgaactcctccagccagcctggcagaaagagcctgatcttaatctgacgcaatttttgcagaaactggcgaaagagtcaggttttgacggcaaactggaagatttaactgatgatatcctgatctaccatctgaaaatgcgcgattccgccaaagacgccgccattccagggattcaaaaagactatgaagaggactttaaaacggcgcttttacgcgcccgcggcgttattaaagagtaaaaccttgtaagcggcgccaccgaaatcgccacgaaatgatatcctgaatcattcgtagtattttccggatgatgggatgaacgacaacgcttttactttccagacgctacacccggaaaccatcatggatgcgctgtttgaacaggggatcagggtggattccgggctgactccactaaacagttatgaaaaccgcgtctatcagtttcaggatgaagaccgtcgacgttttgtcgttaagttttatcgtcctgaacgctggtctgttgatcaaattcgggaagaacaccaattcgcgcttgaactggtgaaggatgaggttccggttgctgctccgctcgcgtttaatggccagacactgttagcgcatcagggctatcattatgccattttccccagcgtaggcggtcgtcagtttgaagcagataatatcgatcagatggaggcggtagggcgttatcttggtcgattgcatcagacggggcgaaaacgtcctttcactttccggcctgacattgggcttgcagagtatctttttgaacctcgccaggtattcgaagatgccgcactgattccctccgggcaaaaagcggctttcctgaaagccactgatactctactgtctgcagttaccgaatgctggcgcaccgatttcgccacgctgcgattgcacggcgattgtcatgccggcaacattctatggcgtgatggaccgctgtttgtcgatttagatgatgcccgtaacggtccggcgatacaggatttatggatgctgctgaacggcgacaaagccgaacagcgaatgcagcttgaaaccattattgaagcttatgaagaagttagtgagttcgatacggctgaaattggtctcattgaacctttacgcgccatgcgtttagtttattatcttgcctggttgattcgtcgttggggcgatcctgcgtttccaaaaaactttccctggttaacaggggaagattactggcagcgacagacaacgacttttattgagcagactaaaattttgcacgaaccccctttacaattaacgccaatgtattaatcggagagagttgatcatgaaaaagatttggctggcgctggctggtatggttttagcttttagcgcctcggcagcacagatcagcgacggtaaacagtatatcacgctggataaaccggtcgctggcgaaccccaggtactggagtttttctccttctactgcccacattgttatcagtttgaagaagtgcttcatgtgtctgacaatgtgaagaaaaagctgccggaaggcaccaaaatgaccaagtaccacgttgagttcctggggccgttgggcaaggagctcacccaggcatgggcggtggcgatggcgttgggtgtagaagataaagtcacggtcccgctgtttgaagccgtacagaaaacccagacagtacaatctgccgcggatatccgtaaagtgttcgttgatgcgggcgtcaaaggcgaagattacgatgcggcatggaacagcttcgtggtgaaatcactggttgcgcaacaggagaaagccgcggctgacttgcaactgcagggcgttccggcgatgttcgtcaatggcaaataccagattaacccacaaggcatggataccagcagcatggatgtttttgttcagcagtatgctgataccgtgaaatatttggttgataaaaaataaaaagaacgccggtcactgaccggcgtttttataagatgttttaatctcttctatctgtatatctttcttatcccacagcgtattaagccaacgttgaaaacggcgtttgaatgttttgtcgttcacgtaatcgccgtgcagttcttcatttatgggttccagttgcacccgaacaacaatacgcgtcagcctaccgcttagcatatcgtagaaagggtggcgatcgttgtttgggtaacacaacgtaatattaagcagcttatcgaactgtgagcctaaaacgttaatcgccattgcaataccggctgcttttggcggcaacagatgttgataaggtgaatgcgtttgctgacgtttctcatgcgtaaatcgcgagccttcaacaaagttaacgatagtggtgggataccgacgaaacttttcgcaagagcgacgagttgtttcaacatctttgccgcgtcgatcggggtggcggagcaggtagctacgggagtagcgcttcataaacggcatatctaatgcccagcacgccaagccaatgaacggtacccaggccaattgctgtttaagaaagtacttattcattgggatatgcttgcggaacagaacgcaaagcacaacgatatcggcccagctgcgatgattacaaatcagtaaataccaatttttcttgctcagcccttctaacccttctacatcccattgcaagtgcggattaaggcgtaacagcgctgcaagaccagcacaccagcaatacatcatgaaattgcagaaaatggagaccttgcgccagatacagggaacaggcaaaaggagctttaccataccggcaacgatgatcggtactgagcaaacaatagtgaccaggatggtcaatacgatactcaatgggagcgtgatagccgcgagtattctcgtcataataaattattcaaaagttagccataaacggtgcgcgaaaagggcgcaagaggctgattctatcagaaaacgatgctaatgatggcgctgagtgaaatagaaacactcgtaacaactatccacattatgataacggcatgaatcagataatcagaaaaacgtgatgttaacaactcattgaaaataatggttaattattaagatgagaaggctatcgcgctgattttaaagtaatggtaagaatttacacacaaagttatccacaggttgttttgcgagcgatcctgaagatcgacaaaacttttccgcaaatgcggcgaaaaactcaagttttcctcctgtatgtggcatcctttaaccataatctgttaaacaggcacggacattatggttcagatcccagaaaacccacttattctcgtagatggctcatcctatctctatcgcgcctatcatgcgtttccgccgttaaccaacagcgcgggagaacctacgggcgcaatgtatggtgtcctcaacatgttgcgcagcctgatcatgcagtatcagccgacgcatgctgcggtggtgtttgacgccaaaggaaaaaccttccgtgatgagctctttgaacactacaaatcgcatcgtcctccgatgccggatgatctgcgagcgcaaatagagccgttacatgccatggttaaagccatggggttacctctgctggcagtctctggcgtagaagcggatgacgttatcggtacactggcgcgagaagcggagaaggtggggcgtccggtattaatcagcaccggcgataaagatatggcacagttggtgacgccgaatattacgctgatcaacaccatgactaacaccatcctcggcccggatgaagtcgttaataagtacggcgtgccgcctgagctgattatcgactttctggcgctgatgggggactcctcggataatattccaggcgtaccaggcgtgggtgagaagacggcgcaagccttgcttcagggattgggcggcctggatacgctgtacgccgagccggaaaaaattgccggtctcactttccgcggcgccaaaacgatggccggtaaattagcgcagaataaagacgtagcgtacctgtcttataaactcgccaccattaaaacggatgttgagctggagctgacctgcgaacagcttgaagtgcagcagccgattgcggatgaactgctgggcctgtttaaaaaatatgagttcaagcgctggacggcggacgtcgaggcaggcaagtggctacaggcaaagggcgcgaaaccggcggccaaaccgcaggaaacggtcgttattgatgaatcgcccagcgaaccggcagcggcgctctcttatgaaaattatgtcacgattctggacgacgttacgctggaaagctggattgaaaagctgaaaaaagcgccagtttttgctttcgacacggagaccgacagtctggataatatcgccgccaacctggtgggcctctcgtttgctatcgaacctggcgttgccgcgtatgtacctgtcgcgcatgattatctggacgctccggatcaaatctcccgccagcgtgctctggaactgctgaagccgctgctggaagatgaaaaagtgcgcaaagtggggcaaaacctcaagtacgatcgcggcgtcttgcaaaattacggtattgagctgcgcggtatcgccttcgataccatgcttgagtcttacattctgaacagcgtcgccggacgccatgatatggacagtttgtccgatcgttggctgaagcacaaaactatcacctttgaagacattgccggtaaaggtaaaaaccagctcacctttaaccagatcgcactggaggaagcggggcgctatgcggcagaagatgcggatgtcacgttacagttgcatctcaaaatgtggcctgagctccagcagcacaaaggcccgctgaatgttttcgaaaacatcgaaatgccgttggtgcctgtactgtcacgcgttgagcgcaatggcgtaaaaatcgatcctgccgtcctgcacaaacattcggaagaaatcacgctacgtctggcggaactggaaaagaaagcgcatgacattgcgggcgaggcgttcaacctgtcctcgacgaagcagttgcagaccatcctgtttgaaaagcagggtattaagccgctgaagaaaacgcctggcggcgcgccgtcaacgtcggaagaggtgctggaagagctggcgctggactatccgctgccgaaagtgattctggagtatcgtggtctggcgaagctaaaatccacctataccgataagctgccgctgatgattaacccgaaaaccgggcgcgtccatacgtcctatcatcaggcggtaacggcgacgggacgtttatcgtccaccgatccgaacctgcaaaatattccggtgcgcaatgaagaaggccgccgcattcgtcaggcatttattgcgcctgaggattatctcatcgtgtctgcggactattcacagattgagctgcgtattatggcgcatctttcccgtgataaaggactgctcacggcgttcgccgaagggaaggatattcaccgcgcaacggcggcggaagtctttggcttgccgctggatagcgtgaccggggaacagcgccgaagtgcgaaagccattaactttggcctgatttacgggatgagcgccttcggtctttctcgccagcttaatattccgcgtaaagaggcgcagaagtatatggatctctacttcgaacgctaccctggcgtgctggaatatatggagcgcacccgcgctcaggcaaaagaacaaggctatgtggaaacgctggagggacgccgcctttacctgccggatattaaatccagcaacgcggcgcggcgcgcgggggcggaacgcgcggcgatcaatgctcccatgcaaggaacggctgccgatatcatcaagcgcgccatgattgccgtcgatgcctggctacaggccgagcagccacgcgtgcggatgattatgcaggtacacgatgaattagtgttcgaggtgcataaagacgacttagatgcggtagcaaaacgtatccatcagttgatggaaaactgcacgcgtattgatgtgccgttgctggtggaagtcggtagcggagaaaattgggatcaagcgcactaagcatttaaggaataacgcgcttttttcgtaattaagcaacataagcacgggggttttgtgatgggtattagaattccctatgtaaagaatgaaaaaaaattacgaaaaggtctttctgtgttgctcaaaaaagagtaaagttattcacgtagggtacagaggtaagatgttctatctttcagaccttttacttcacgtaatcggatttggctgaatattttagccgccccagtcagtttatgactggggcgttttttattgtgcgcaagaaaagtttcgctcacaccgtaggccggataagacgcgcagcggcgccatccggcatagcgggtgattattccccgtcctgaatctcttcgaccggtgccagttcactaaaccagctatccagcttctgacgtaacttatccacgccctgctttttcagcgaggaaaacgcttctacctgcacatcgccattaaaagccagcacggcttcacgtaccatattcaactgcgccttgcgcgcgccgctggccagtttgtccgctttggtcagcagaaccagaacctggatattgctctctacagcccactggatcatctgttggtcgaggtctttcaacggatggcggatatccattaaaacgactaagccctgtaggctttgacgtttctccagatattcccccagcgcgcgttgccacttgcgtttcatctcttccgggacttccgcatagccatagcccggcaggtcgaccaaccgtttgccctctacgacttcaaacaggttaatcaattgggtacggcccggcgttttagaggtgcgcgccaggcttttttggttggtcaacgtgttcagggcgctggatttgcctgcattggaacggccagcaaaagccacttcaattccgcaatcggaaggtaaatggcgaatatcaggcgcactcatcacaaaatgcgtctgttgataattcaggttagtcaaagcggtcgtctccgtcagtcaaagcattgtggcgattatacctgaacgccagcaaaagacggatttttcggcgcggcggtgctgtaagtaaaagccatacgctttgtgagacattgaccattgcacttatgcgacatggcagagtcgttgtcaggctcaaagccagttaatatagttaaatcatgaatttatagaaaggtaattgtctgaaaaaaagggatttgccgtgtcggtatcttgtgagtttaccccaaaagagtaaagtaatgcacatagcgaggacgctaacaggatcaacgactcaggatgagggtcaggagcgccaggaggcgaagacacaggattgtcaggaagacaaacgtccggagacgttagtaaaaggaaatggaaacaacatggaatgttccaggctaagggaaaaacagggcgtgttgatagccaacagggatggtggaacccgttaagggtcgtgagtcaagaaaaaaggcggcagattactctgtcgccttttttctttgcttgctttctgctagattccgcctcaattctatactgaataaaacggcttaaagatctgacatcatgaaaaaaccaacctctgcaccgcgcagtaaagcctttggcaaacagcgtcgtaaaacgcgtgaagagttaaaccaggaggcgcgcgaccgtaaacgcctgaaaaaacatcgcggtcatgcgccgggaagtcgcgcggcgggcggcaattccgcttcgggcggcggcaatcagaatcaacaaaaagatccacgtattggcagtaaaacacctgttccattgggcgtgactgaaaaagtgacccaacagcataaaccgaaaagtgagaaacctatgctttcaccgcaggcggagttggatttactggaaacggatgagcgcctggatgcgctgttagaacgtctggaagcgggcgaaaccctgagtgcggaagatcaagcctgggtagatgccaaactggatcgtattgatgaactgatgcagaagcttggtctgtcttacgatgacgacgaagaagacgacgaagaggacgagaagcaggaagatatgatgcgcctgctaagaggcggcaactaacgggtttacaccgtgggcttgcccgtcctgcttataacccttccggttatatgttatctggtgtggttattcgttaaactacagcgattgtcgcggcgacagaaatggctgcgcagccggcttgccgcccgtcatggcgtgaagccggtacgccgtacccgccagagacgccatcggaaggagtgagcatgtctgaacagcaaatagactgggatctggccctgatccagaaatataactattccgggccacgatatacctcgtacccaaccgcgctggagttttctgaagacttcgaggacgccgcattcttgcaggctgtggcgcgttatcctgagcgtccgctctcgctgtatgtgcatatcccgttttgtcacaagttgtgttatttctgcggctgcaacaagattgtcacccgccaacagcataaagctgaccagtatcttgacgcgcttgagcaggaaattcgtcatcgcgcgccgctgtttgcagaccgtcatgtcagccagcttcactggggcggcggtacgcctacttacctgaataaaacgcaaatcagccgcttaatgacgctgttgcgtgaaaatttccactttaataccgatgcggaaatctcgatcgaagtcgatcctcgtgaaattgagctggatgtgctcgatcatttacgtgcggaaggttttaaccgcctgagtatgggcgtgcaggactttaataaagaggtgcagcgcctggttaaccgcgagcaggatgaagaattcatctttgcgctgcttaatcacgcccgcgatatcggctttacctcgaccaatatcgatttgatctacggtctaccgaaacagacgccggaaagcttcgctttcacgctgaagcgtgtgacggaactgaaccccgatcgtttgagcgtctttaactatgcgcatctgccaacgctttttgccgcccagcgtaaaattaaagatgctgatttacccagcgcgcagcagaaactggatattttgcaggagacgatcgtatcgcttacccaggctggttatcagtttatcgggatggaccattttgcccgtccggacgacgaactggccgtcgcgcagcgcgaaggcgtgttgcaccgtaattttcagggctatacgacccagggcgataccgatctgctggggatgggggtttctgctatcagcatgattggcgatggctacatgcagaaccagaaagagctgaagcgttattaccagcaagtggatgagcggggcaatgcgctatggcgtggtattacgctgacccgtgatgattgcattcgtcgcgatgttatcaaggcgctgatttgtaacttccgcctggattttaacgctgtcgaacagcagtggggtttgcatttcgctgagtattttgccgaagatttgcagttactgtcgccgctggcgaaagatgggctggtggatattagcgagaagggaattcaggtgacggcgaaaggtcgtttgctgatccgcaatatctgcatgtgctttgacgcgtatctgcgccagaaagcgcggatgcagcagttctcgcgcgtcatttagccgggttgcccggtggcgctgcgcttaccaggcctacacgttgcgacaacctgtaggccggataagcattagcgccatccggcacattgtcagctgaacagtcccaccagcgcggcacacaacacggcggctagcgcagtttgtggcgtgtggctgtcgaccgctccactcgataccagattaataatagattctaacataatgaatccccccgtttgccgggcatgatcatactgaactcatcggaacagtaaagcgcaaaatagcagcgttttgcgctcaattattaatctttacactcgcgggtaatgtttactccattcccagctctttcaacttccgcgttagggtgtttcgcccccaaccgagcagcctggcggcttcctgtttatgaccctgcgtatggcgtaatgccgtggtcagtagcgttctctccagttctggctgcgcttcagaaagcaggttttgatgaccggatcgcaaggcgcggtccgcccattgtgccagtaatgtagcccagctatccggcggcaggtgggacgggctatccggcgtcgaggcttcaaacagttcgcccggtaaatcctggatcaatacctcctgtccggcggccatgacggtgagccagcggcaggtattttctaactgacgcacgttaccaggccatgccaggcgcgttaacgccgtttcggtttccggatgtaataatttggcttccacacctaattcacgggcggcgacctgcaaaaaatggcgcgccaggcgcggaatatcctcacggcgctcgcgcaacggcggaagatggatacgaatcacgttcaggcggtggaacaggtcttcgcggaatttcccttcctgaacgcgtcgttcgaggttctggtgggtggcggcgataatgcgcacatccacttttaccggcgcgtacccgcccacgcggtagaactgtccgtcagccagcacgcgtaacagacgagtctggacatccagcggcatatcgccaatttcgtccagaaacagcgtgccgccgtcagcctgctcgaaacggccctgccggatggtattcgccccggtaaaagcgcctttctcatggccaaacagttcggattcaatcaaatctttcgggatggccgccatattgagcgcgataaacggcgctttggcgcgtgggctatggcggtgaagcgcatgggcgaccagttctttaccggtccctgattcgccgttaatcagcacgctaatcgaagaacgcgacagccgaccaataatgcgaaacacatcctgcatggcgggcgcttcgcctatcatgtctgttgtcgggccgttaacctcgatattacgcggctgctgctgctcctgatagtggctaatcgcgcgctcgaccagagcgacggcttcatcaatatcaaacggtttaggcagataatcaaacgccccctgctgataggcgctcacggcggcatctaaatcggaatgcgcggtcataatgatgaccggaagcatcgggtgacgctgtttaatctgctttaatagcgccagcccgtccattcccggcattcggatatccgacagcaagacgtccggcgttttactggccagcgcagccagtacttcattaccattctcaaaggtggtacaggtcaaccctgccccggcgagagcacgttcaagcacccaacggatggaactatcatcatcgacgacccagactattcctcgttgcataaacacctctatttccgaatcggcaggtaaaccgaaaactcggtatgccccggccaactggtaaattcaattttgccggcgtgttgatcgataagattgcgggcgatagataacccaagcccggtgccgccttcgcgaccgctgaccatcgggtagaacagcgtatcctgtaaatggggaggaatgcccggcccattgtcttcaacgtctatacgcgccgccaggcgatagcgttcgccatgcagcgttaactggaaggcggtacgggtacgcagcgtaatttcgccgccatccggccccagcgcctgcaaggcattgcggacaatattcagcagtacttgctcaatttgttccgggtcatgcggcagttctggcagactggggtcgtaatcgcggataagccggacattatccggcagttccatcgacaccagcgccaccacgcgctccgcgactttatgtatgctctcggtaatgtgcattcccgggtgctgcggccccagcaaacgatcgacaaggttgcgtagcctgtcggcctgttcaatgatgactttggtatattccgttagcgccgggtcgggcagcgccttgctgagtagctgcgccgcgccgcgcaggccgccgagcggatttttgatttcgtgtgccagaccgcgcaccagatcgcgggcggcgatttgctgcgcgtgctgcaactgctcctgactcagacgacgctggttatccatcggcgccatttcgagcagtataaaatcgtcgggcagacgttgggcggtcaaagagagaatatgcgagcgactatcaatcaccagcgtcacttcgttatcggtaaagccttgccctgccgctaaactttcgcgcatcaggtcaatgtttaacgaaaaatagctcaacagttcaggtaacggcgtcccgaacagtttgcgtgagctttgcgcgagcaactgctgcgcggcagggttggcgtaatggattgccagcgcgtcgtcgaccaccagcacgctgttgattaacgaattgaggatctgcccagcatcgggctgtatgccgcttgccattcagcagtctcctggaaaaggttgcaccattttagtgcattatagctttttaccactaaaaagcgcgtgagatcagattgttggtggagaaaaaagcccatcctgggatgggctgaaagtttccacggcaactcaaaaactcctgacgcctttcacgctgctgctgcgttggctgccttcgcttaccccggtcacatcgctatctatgctcctggggatgtgctcagttgccgccttgcagcaacgcgaaattcgtcggatttttaatatacgattaaacgctgtagtacagctcaaactctaccgggtgcggggtcatacgcacgcggtcatcttcttcgcgacgcagcgcaatatacgcatcgatcgcttcatccgtgaacacgccgcctgctttcaggaactcgcggtccagatccagcgcgttcagcgcttcttccagagaacccgctacctgtgggatctctttcgcttcttccggcggcagatcatacaggtttttgtccatggcttcgcccgggtgaatcttattcttaatcccgtccagaccggccatcagcagggcggcaaagcacagatacgggttagccgccgggtccgggaaacgcacttcgatacggcgcgctttcggagacgccaccaccggaatacggatggaggcggaacggttacgggcggagtaggccagcatcaccggcgcttcgtaacccgggaccagacgcttgtaggagttggtggtcgggttcgccagggcgttgatggctttggcgtgtttgatgacgccgccgatgtagtacagcgcctgctcagacagaccggcatatttgtcgccagagaacaggttggtgccgttcttcgccagcgacatgtggcagtgcataccagaaccgttatcgccgaacatcggttttggcataaaggtcgcggtcttaccgaagcggtgagccacgttatgtacgacatatttgtaaatctgaatttcgtcggcttttttggtcatggtgttaaagcgggtcgccacttcgttctgacctgcggtcgctacttcgtggtggtgcgcttcaacgaccaggcccatctgctccatgaccagacacatttcagaacggatatcctgcgcggagtcaactggcggaaccgggaaataaccgcctttcacgcccggacgatggcctttgttgccgccttcatatttggtagaggagttccaggcgccttcaatatcgtcaatcgccacatgtgagccggagatagatgcgccgaagcggatgtcatcgaacaggaagaattcaggttccggcccaaacaggacggtatcggcgataccggtcgcgcgcaggtagtcttccgcacgttttgcgatggaacgtgggtcacggtcataaccttgcagagtgccaggctccaggatgtcgcaacggataatcagggtagagtccgcgaagaacgggtcaatcactgcggtggatgcgtctggcatcagcaccatgtcggattcgttaatgcctttccagccgccgatagaggagccgtcaaacattttgccttcttcaaagaattcggcatttacctgatgagcaggaatcgtgacgtgctgttctttgcctttggtatcggtgaagcgcagatcgacaaacttcacttcgtgctcgttcagcatcgtcaaaacgtgttcagcggacatacttgtactctcccggattggtcatggtcggtcgtcgtggtaacgagatcttcaattctgctggccgtgtcgccgtaaaaatataaagcgaaatctgtgccaactttcacattgcccccaaaaggcgttatcatgcgtaccatcgtgcaaaagggctgcaccacggtgactatgttgcaccaaaatagtgctttaatgtgaacattgagcaccacattggtgcaatagaacgcaagccacccttttaacgctccgtgaaagcgatcacaaagagactctgcaatacttgtttgcggaggatgtttgtgatcctgttttgtagtgcgattaatccgtgtacaataacgcgctatttctaatgcctgaggcaaagttgtgatcgaaaatttgcgtaacatcgccatcatcgcgcacgttgaccatggtaaaactaccctggttgataagctgctccagcaatccggtacgttcgacgcgcgtgccgaaactcaagagcgagtgatggactccaacgatttggagaaagagcgtggtattactatcctcgctaaaaacaccgctattaaatggaatgattaccgtatcaacatcgttgatactcccgggcacgctgacttcggtggtgaagtagagcgcgtcatgtccatggttgactctgtgctgctggtggttgacgcatttgacggcccgatgccgcaaacgcgcttcgtgaccaaaaaagcctttgctcatggcctgaaacctattgtggttatcaacaaggttgaccgtcctggcgcgcgccctgactgggttgttgaccaggtattcgacctgtttgttaacctcgacgcgaccgacgaacagctggacttcccgatcatctacgcttcggcgctgaacggtatcgcgggtctggaccacgaagatatggcggaagacatgaccccgctgtatcaggcgatcgttgatcatgttccggcgccggacgttgacctcgatggtccgttgcagatgcagatctcccagctggactacaacaactatgttggcgttatcggcattggccgtatcaaacgcggcaaagtgaagccgaaccagcaggtcactatcatcgatagtgaagggaaaacccgtaacgcgaaagtaggtaaagtgctgacgcatctgggtctggagcgtatcgacagcgatatcgccgaagcgggcgatatcattgcgatcaccggtctgggcgagctgaacatttccgacaccatctgcgacccgcagaacgttgaagcgctgccggcgttgtccgttgatgagccgaccgtgtctatgttcttctgcgttaacacctcgccgttctgcggtaaagaaggtaagtttgtgacttctcgtcagattcttgaccgtctgaacaaagagctggtgcataacgtggcgctgcgcgttgaagaaaccgaagatgcggatgcgttccgtgtatccggtcgtggcgaactgcacctgtccgtgctgattgaaaatatgcgtcgtgaaggtttcgaactggcggtttcccgtccgaaagttatcttccgtgaaatcgacggtcgtaaacaagagccgtacgaaaacgtgacgctggacgtcgaagagcagcaccaggggtctgtcatgcaggcgctgggcgagcgtaaaggcgacctgaaaaacatgaatccggacggtaaaggccgcgtacgtctcgactacgtgatcccaagccgtgggctgattggtttccgttcagaattcatgaccatgacttccggtacgggtctgctgtactccaccttcagccattacgacgatattcgtccgggtgaagtgggtcagcgtcagaacggcgtactgatctctaacggtcagggtaaagcggtggcgtttgcgctgttcggtttgcaggatcgcggtaagctgttcctgggtcacggcgcggaagtttatgaaggccagattattggtattcacagtcgctccaacgacctgacggtaaactgcctgaccggtaagaagctgaccaacatgcgtgcgtctggtacggatgaagcggtgattctggttccgccaattaaaatgagccttgagcaagcgctggagttcattgatgacgacgaactggtagaagtcaccccgacctctatccgtatccgtaaacgtcacctgacggaaaacgatcgccgccgtgcgaaccgtggtcagaaagaagagtaattaacgttcttacggataaaaaccctgccgaaatgaaagctcggcggggtttttttattcacgttgagaaagggataaggttgccaaaaaatcagcaattgctggcgtattatgccgaccaatgacgctgtccgcataaacctttgcccgggcgctggcattccccatcgctacgcccaatccggctaaacgtagcatttccgcatcgttatcattatcgccaaacgccatcacttcgcgcattgcgatatgctgttgctgtgcatatctggcgaggctttgccctttgctacaccccttctggagaatatccagttgatgatgccaggaccaggtacagcttagctgtaattcatgctgtataaactcagcaatattttgtagttgttttatgtgccgatgaacgacgctgatttgccaaatattctccctactgcttagctcatcagcctgaaagattattttatcatcagcacgaattgtcggtttaagcggatatacccgcgccagtattttttccgtttgtaagtgcgtcagcggcagtggatgaaggatctgctgttgagccggttgataaatataacttccgttacaacagatcatcggttcggtgagcgccagcgtttgataatacgcataggcttcacgatgagagcggccggtgacaagcattattcggcagcccatgtcttgcatctgacggatggcggttagcgactctggcagaatttgtttattacggtttagcagcgttccatcaagatcaaaagcgattaaacgatatcgcatgagcgcccgatcctaaaacagcgtgaggtatccaggtgattcagcaatggaatatcgagacggtgctgataagcgagaaaacagtggcattgttttgcctggcaggcgggagaattaagccgttgctgatataaattacccattttaattttgctgatatgacaagcaaaaagatcgccttctgcattcataaaaatactttttcttcctgcggtacagatatccagctgcgctggccactgctgcgtttcaaccacatacagcggatcgagttcgctgaaggcgatggtttcctcaacggtatgccgggtattggcacactcgttggcgttaaaccaaaaataattctggtcaggcaactgctggcgtagccaacgaaactgggcgatatctttcatactggcgacagcccccgcgcaccaggttattccggcggcagagagcgctaaacactgctggagaaagcgctcagcggtaatttgtgagggatgaaaagaacaccataaccgaagctttgagatatctccgccgccggcacgaaatgattccagcaatgacattaacgaaaaagaggcgttagtttgtatgccgaccgcctgaacatgaggatagcggctaatttctgccaacgccgccatgtaataacgcaagcgtagcgcctcgccataaggcgtaatcatcacattcaacggcgtacctaaaagaggcaaatggtcaaccatgcgccatagcgcggcttcgtcgcgttttttatcgttgcgggcgtgtttatggaacgggcaatagccgcaatgataattacacgatttaagatagccgcgataaaacagcgtgtgaatatcgcgcagggcgggggcgctcatctctgccgattctcccgtagcatcacctcaggcgaaacgaacacaggagcaaggcaatcggataatgccataccggtctccgttagccggaggcgactgccattctgatagcagtaaccctgccgtatgaagcgttcaaggtcggggaaatcccttagcgcatcgctggcaaaatattgctgataatcgctaagagaaagtccctgccagaaaaatagatttttaatgataaagcggcgtttcatttcatcagggggaagcagataaccgtgattaatgacggttttatccgggctgtcgataaacgcctgaatgatttttcgtgatgtttgcaggttcgacgaccacggtgaacagtaatgcagattgccaagataacttctgccgcccgcgccgagcgccagtgagttttcaaatccgcagctttccgccgcggcggatggcgctggattaaggacgaaacggcgcatggacgtttgggtgtagcccgcgttgcgtaaaagatcgcgggctaaaacgtagtagctatgcatattttcctggcgaggcatattataaagcggataaaggaacagctcttccggttgataaacgagcgcctgatgtaacgattccgtcaggcttgcgtgagtctggccgggaatgccataaataatatcaatattgagtgatggaaaatgacccgcctttagccattccagcgcctggtgcgcgctggcggcattgtggcggcggtgcagcgtatgtaactcgctatcatgaaaactttgtacgccaatactgacgcgattaacggaaaaggcgtttaatagcgctactttttctgccgtggtatccgtaggggaagtttcaatcgttttataaatattccagtcaacattgagcacatcaaagacggaaaaaaataacttctctaattgcgcaatatttaatagcagaggtgtgccgccgcctacggtaaagcttgcccagtgggcgggcgccagcgccatttgtcggccctgggtaataatcgcgtcgatatagctatcaatgaacgtattatctgcgccagtgcaggtaaataaattacagaacccgcagcgactttgacaaaagggcatatgaacatacagatgtgtgtcgtgctcgtaaatccgcggttttacttcgctaaagctgacgttctccacctcccgataagccgtcttatgcggataactgtacatatactgacgataaatatcattgttattcatattaatgattacagctcagcaagaaatgcatatagggaacggtattaacgatcggatgattaaaactatggaaatatttcccgtcttcgccatagcaggtaccgtgatcggagcagacaataacgaacgtttcgccgccggtttggcggaaaatgtttagtaatccgtcgatgcgggcgtcgatatagcgtagcgcggcggcatgggtctcaacggtatcgccaggggccgcgccctcaacgtaaaaatggttagggtaatgaatcgtgtcgatattgatatacatcatgaccggttggctgccagcacgctcggccatgattttctggatataatggatctggttatccatactttctttaaccgtacaggcaaatcgtggatgccagtaactctctttaaacatcgacgggaacacttttcccatgccggagcggttattaaagaaagagacgccgccaatacagatggtctggtagcctttattttccagactttttatccatgttgcgtcatcaaaggcaaatgcatttttcggccctttacgaccaagtccgatatcttttgggaaaaacagcatggtctgattaacggtatcatcaataggttttggcataaaacctgaaaacatggcgtgatgcgaaggccaggtaaaattaccggccgcctcgcatttcgtccattgtccataatgattaaggttgggcgtatttccggcggtttgttcctgaagcgcaatatcgtagcgtaacgagtccagcacaataaaaagaatatgagcgttattactaattagcgtattcatatcgaattcgccatcgcctgtgtcaatcgacgcgtgcagcgagacggggacttcatccattgaattatacattttgcttcctcatggcccggatttgcgcctgataaattagattattctgctgcgcatcctgataaatcaaatcaccctggccattaatttcaataacatacggcgtcaggctggtagtaagtaaaacatcaatacccgctaagcgaatgccagggaaaagccgcatggcattttgacagagcgtatcgatctcagtcacttttgcggcagataactccagactttcgaagcagtaagcctggttttgcagatgtaagttagtaatgggctgcgaggaggttctgaccactcgccagataatttcgccatccaggcagacgatgcgtaaatcataggttttatgctttacgttggctttgggcagccactgttcgacgaggttttcctgctgaagaacgccatcaataatgagctggatatcttctttctgacgatactgttggatttttttgctgttaaatagctgttgtcctgatatggcaatcgcgctgtaaagcacctgctttatgccatcagggtggcggcgcaaagcgataacgcccgccgcgccagaacccagcgagggcttaatgaacacgctggcgacccttttttcctccatgatggcggtgagctgtacaaaactttttacgtcttccgctaccaacggcggcgtggggatgccgtgttccagtaagcgccgcttgcagagttttttatccaacaggtgaatgaggcccgccggatggttaagccaggtgacgccaggacgcgccgccatgttctgcaaaaaatggatatagtccagaccgatcgcgtttattttgcggatgtctgtttcactgtgtactggcgggtcgattttaacgatgccagaggtcagcgaagcgtccagcgcttgcggatgagtcagcgccgtgacgggttccccaagtacggcggcagcctgcataaaataatgcgtgcgcttgctctgacgggggccaatgagcgtaatcacaataaatccctttatcgttgtgtaggggaatgtgcacattcccctacacaatcactcggtgtacatcgcattcatataaatatcgccatcgtaatcatcaggctccagagcttctgaaagattcaggtttatcggcagtgtggcttttagcttttcctgcatctccggcgtcaaatagtggtggtggagatcgagtgtttccagatgcgcaattcggtctttatgctccagcagcgcctctgcgccgttgtccgttaaggtaccgcatgagagttccagcacgttaagctgcggcaggatattactttccagcacccggcgggcgatatcatcctgctcttcgctgttcatcaaccccagatgggtgagctgagggaaaaggtctttcgatgccagtgccatcacgtcatccagcgaaccgtcaaaaccgtattcctctacgcccaggaagagcttcagcgtttttaatgcagggagctgcgcattttgtagttcggcaagtacgttagaagggatgccgccggaaatgatttccaggtgctccagtttctcatgatgtatagcgcccagtcgcagatccgacgcgcctttaataatcagttctttcagattgggtaacgccgcatagagcctggaatagtcaccttgtttaatccaggagatctcgcagtcttcgctctccatatcaccgataaacagtgattccaggtgagtaaagcgggaggcgttctccacaatcatatcaataataggctggcaggtttcgtcttcccaacaatcaccccagttaccaatggtcagtgagcgaagctttggcagatcttcatcggttaaaatcaaattaatgagctgttcctgggttaattcattgtcccaatcaatattaaatcgcttattcatttgtttcccttctctataagcatgaatatggtaaaacgctttgcgaatattatcatggcgcttagagacgggatatcgggagtctgattcaggatgaatgagcgggcagaacaactacccgctgtgatgcagattcgaaaaatagaggcgataatatcagaagaaatacttcgccccgatacgaatctggttttgctctctatggtagggacccacgttacgatctaaccagcgtaattcaaagtagggcaaccagtgttcattgatacgataacggaaggtattagtgatttcccaatgatgcttcgtaccattactactattaaaatcattaacgttataaaaatagtgtggttcaaaggtataagaaaatttatcggtaatgataaaattccaatagttaccgatttcatagctgtcattattatccagttcgccattcaaatcggttgaactataattattgtgattatatcggttacgtaccgtaagattaaaccacggggtaaatttatagttaacatccagatagacggcgccgccggaaccaatgcttttgtcgtttattaaccccccaggctggatggttaatttatctgtaggtttaaataatggataccagccctcaatctcattataaccgtgctttaattcatcatcacgctgtagcgtataggtattggtcaacataattccggcccccatatcggagttatagccgacgcgcagcataaactccatttggtcagacgccaggttataggcctcacggttttctacataagcgccagcaaaaacagaggtggatattactgaagttaatatcactagagtattcagagatttcataataaatccatttttcaaatatagggaagccgccatccatcgggatggataaagcggcaagcgtcgtttaattatttacagtagaaatactttgtttattattagtcgcgacaatttgattacctgttttctttcgttgggcaatttcctcgataataaaagcgaaacgttgttcattgagcttataaaaaaagcccatcgttagtgctgcgataatggcaagaccgcaaggccataaaaaaatgagctgacgcaaaccaagcaacgtggtgtcactttgagctatgttggggatataaccgatttgcgtcagcataatacctggcaaaaagccagcaagcgcagcggaaattttgcgggaaaaggtataacccgtatacaccgagccttcagcgcgaatacccgttttccattcaccgtagtcaaccgtatccggaaccagtgcccagttcaggctgttgacgaaagcggtaccgaagaaggcgatacaagagaaaataacaaacaggaatgacgttccaccccagataaaattcaggatatcgccaacggcccacaatatcagaccaccaagataaacctgttttttcccgaagcgttttaccgcagcaggtactaataaaacaccaatcaggatacagcccatgctgaaaaacccatccatgacaacaaatgaatatcgttcagcacgtactgagtgtaataaacctgaatggccagcttgatattaaaggcggccagcgtgcacaaattggcaacgcagagcaccagcagcggcggattacgaaaaatcgcgcagaaggacttcaatatgctgggtttatgcgtgtcaggtacggtttcgatataccgttctttcaccccgctaaagcaccaccacatgctgaacagcccgcagaccgaaaagatgactgctgcaatcagataacccagcgaaggggaacgggtaaacagcgcctgaatgggcataaaacctacggtacaaagaagaaggccaatggtagcgccgccttgtcgccatgcggcgagctgggcccgctcatgcggatttttggtaatagcgggtaccatcgcgccgtatgagcagttcatcaggctgtagaacagaccgaacaacataaacagcaccgtcgcgaaggctgttttaacgggtaaagtaaagtgagtggcaaagaattgcgcagtagcaaccagagcgactggaaatgacgcatacagaataaaaggccgaaactttccttttgtgccaatattacggcgtgagtccagcaatacgccggtgagcatatcggtaaaagcggtgaagaatttcgccaccagaaagataattccaccgtaatatgcaggcatcccgagttcatcggtataaaacttcagtagatacagcgtaccgatacacagcatcagatttgagccgaaatcgcccacgccataggcgcatttttcccgcaggctcaactttagcgttagcggatcatgattagacataatcgcctctcaaaacgccccgcagggcgttatattttattgttgttaaaccgtatgtttccgggcctcaatctcttccacaattcgcacgtacatcttctcgttgaggttgtagaaacagcccatcgcaataatggtgatgaccgccagcacgcaaggataaataaagatcaactggcgtaggccttcgacggtgcctgccgattgcaccacattcgggatataaccgatttgcgttagcatccagccggggaagaaccctgccagcgcctgggagaccttacggaagaacgtgaagccggtgtaaaccgtcccttccgagcggacgccggtgcgccattcaccgtactccaccgtgtcggaaaccagcgcccagttcaggctgttgacgaaggcggaaccgaagaacgccaggcaggagaaggcgacaaaactgaccgagccgccgccaaagaagtagttgagcagatcgcctgccacccatattaacagcccgccgatatagactttcttcttgccaaaacgccttacagcgccgggcatcaaaaaaacgccgataaaaatacagcccatgctaaagaagcccatccaggagaggaggatcgggtcgttaagaacgtactgggtgtaataaacctgaatcgccagtttgacgttgaaggcgccaagagtacaaaggttggcgatacacagaataaacagcggacggttaccggcgatggcgcggaacgactgcaataatccaggcttttgcgcgctatcgacaggtttcacttcgacgtagcgctctttaacgccggcgtagcacagccacataaatagcaggccaaacaatgaaaatagcgtggcggcgaaaatatagctgagttgggcattgccttcgatcaggttcatgaccggcacaaagccaacggtacacagcagcaggccgagagtggcgccgccctgacgccaggcggcaagcgaggcgcgttcatccgggttcttggtaatcgcgggtaccatcgcgccatacgagcagttcatcatgctgaaaaccagcccgtacagcataaacagcatcgttgcgacgacggtttttcccgtcacctcaaacggtgtgccgacaaagttagcaatcgccagtagcgttaccggaaatgccgcgtaaagcacgaacgggcggaatttgcccttcggaccaattttacgccgcgagtcgagcataatgccggtacccatatcggtaaatgcggtaaaaaatttggcgatcaggaaaatgataccgccataagttcccggtaaaccaaggacatcggtataaaacttgagtaaatagagggtcccgatatctaacaggatattggaacctaaatcccccagtccataggcaagtttttctttaaacggcaagcgtagggttgccggattcgatgatgtttgactcattattcttctccatctgcccgcaggtttccctgcgggcgagccgtattagatattccgtaaagaagcaaaaagtgaagcccactcgctcttcgcgcgatagaagaccggcggtttgccaatgggcgcatccacggtaatttcaccgccgtggtgaacttcaccggtccagatattcacccagtgatcttccggcaggtacagcgtccagtcgcaacgcccctgctcgtgaaccggcgcgaccagcagatcctgaccgagcagatattgatatttcagggtgtaggttgcggcatcgttctcgtagtgcaggaatagcggacgcatgaccggcagaccggtatccgcgttttgcgccaccgcctgcttgagatacggtttcagcgtggtaaagacggtggtcatacgggcaaagtgggcaatggtttcctcatcgccatcaaactgccagttatcgccagggcggttgccttcatgggtgcgcatcattggggtgaaggcactgaaatcacaccagcgcagcaacagctctttgctgcgtttcatgtcaaacaacgtggtgtaaccgccgatatcgctgtggtgcagaccgtgaccggtcattgccagcgacagtgcggcaggaacgaccgaggccagtccatcatcaaggctccagtcaacgttttgatcgcctgcccacatcatggtggagtacttctgactgccggtgtagcccgcacgcataaagaacaggatctcgccgagcttgccggtctcctgtagcgcttcgtagttacatttcgcccacagtgcgggccacgcgttatgcataatttcggcactgacgccgttgtgcaggtaagtgtcggttggcaggtattcgccgaaatccgccatccagccgctgcagccgagcgcgatcatgttctttttgatgacgtctttgaaccagtcgtaagcttcaggattggtcagatcgaccacgccgccatagaattcgccaaactcgaccagatagtcgccgcccgtggcgtctttcgccaggtagccgtgtttcgccgcctcggcgcagaggtctttatcactggcgacgtatgggttgatataagagaggaactggacgccttcttctttccactgtttgatacggctatccagctgtggatagttgtcgctattccacttccagttccacatcacgcgtttgccaaaggaggtcatgcgaatgccggaccagtcctgcgcccaaataccgttcacttttacgcctgcgttgcgcatggtatccagtttttgctggcaaacttccgtaccgccctgaatgcctagcgtgacgccgtcgtaaacccagtccggcagctccggctggcgacctaacagcgcagtcagtttttccagcagggcgatgtaggtgtcggcacactcaaaacgtagcgtagttttatcttcccacagcgccagttcgtgatactccggcgcgctgaagtcgaaattcatatagcagctattatcgacgtggcagtaatacttctgcgtgctgacaaaggtcggttgcgggaagaaggtccagtaatagtcgccgccggcgttctctttacagtctgcctgccaggtgacatagctggttttattacggccaacgccctgttcgctggtccacagcgggaacggcttgccgcgcaaatcgaaataagagaactgttcgccgcagccgtagatatggtcgtctggattagctgcgaggcgtaaccagatacggttatggtgcaggtcgtcgttttgcagatccagcttcaggcgtcccgcctcatcggcggagatgcgaagggtggcgctaattgttgcgccacggctgaattgtaccagccagccgtcgggtagctcgctgacggtggcctccgttaatgcaatcttttcgttaagtttgtctttgatgctgaagttgccgcgaaacatgtcaatgtcggcaacgcccgcgccaatccacagacagggattttcggtgctgtggcgtaaaatcaggcgctgttgccagctaagcgcaaaaccatcctgtgatgttgtcagttcaaaatcggttgaccgttgtggtagagaattcattgtaatctccgtgaatgtagggtaattcggtaatccatttgggctagtcgcagccgatggaaaaatgcagttgatggatcgcttttggggcaagatgaatcagtgcgatcccggaattaaatgcatcgggcgggcagctcataggctctaccgcgagaccttttcggctgagtttttcgccggtatagatctgcaaccagggctgggtgctgcgtaaaaatgtggacatgttctgcgttgggctggtaagtctgacctcccactcagccggggtagtcgcggtcttaaccgcatgatcaaggcgcgtttcgccgagcaggcatgatgcggaaaaatctctgcctgcgggcaattcttcgcttgccggcagtgttaatacacagctatcgatgctttgcaggttacaagtcaaataaggatgtgcgcccgcgccataaggggctgattcatcgccaatgttttgcgtacgaatcaatacgtgcagcccactggcggcatctaaccgataaatcacttccgatatcaacgcaaagggatagccgtaagagggcggcagaaaaatcgttagcgacgcttccgtcgtcgactgataattaatctgccagtctcgccaggctaacagaccgtgaatggcggtctgcgaaaccgggtcgttaacggcaagctggaaaactttgccgttataggagtagcagccatttgtcacgcgatttggccagggaatcaatactttccccagatgcgccatgggtatttcttccggtttatgcgggatgaccacatgacgtccatgatgagtcagttccgccagacctgcgccaaccgtgacgattttcgcctggtaatggcccgcattaagctgaatagtttttccaccgctatgcatggctgccatcctcatgacctatttcgcgttgatatccaggagacccgccgcgaccgccggagccaggcccggcgccagtggcagacgaggaatgaccagacagtgcagcagatggtaaatatcttgcttgccgtcccacactttggtggtcactttgttatcggcgtccagctcttgccaccaggaaccattttcatagtccatcaggtacttaatgcagtagtcccaccatttctgataccactcttcatgctggctatcgcccgtcagggtgtggagggcgtaggccgtacccatcgcttccacaatcggccagcgcacgcgttcacgtacgataggtttaccgtcccagtcgactgagtagacaaaaccgtctgcgccatctggcgcccaggcgtcgcggatagtggcatggaacagacctttcgcgtcttccagcagccaggcgggtggcgtttcgaagcgggcctccagcgcagcatggagatggagcatcagacggccccattcaatccagtgacctggcgtaccgccgtaggcgcggaaacggtgggcaggattatctttgttgtagtcgcggatagggttccactgtgaatcgaagtgctcattgacgcggtaatcaccgttgcgcgccacatcatgaataattaccgacgcgatacgcagcgcgcgatccagccattttttgtcatgggtaacgtcataaacaatcaggaacgcttcgacggcgtgcatattggcgttaccgccacggtaatcttccgtctggctgaaggcttcgtcccaggactccaggcacatctgctcttcttcactccagaagtatttctcaatcacttctatggtgtaatccagcaatttcctggcttcaggatgcccggtcgtgacggcgctggccgcgcccagcaaggcgaagaagtgttgataaccctgtttagaggcatccaccacgccctgatcgttaacgcaggcataccagccgccgtattttttatcgcgcagcgcgccgttcatggctttgatgccatgatcgaccagatcataagcgcccggtcggcccatcgacgccgccacggaataaacgtgcaacatacgcgccgtgatccaaagatgggtgcccatctcttctttaatttgccctttatttcccagccagccgaagcctgtcggcaccacggcgtttttaccgaaattaaagatgcggtcggtttcctgctccagccagtggttgtggctcaacgtgttaaaccatttcattctttcatcctcgtattaacgacgtttcgccatcatttcatcgacgatctcgcccagacgttgcaacttaggcgcggaaacatcacgtagcatcagctcggtatccggtagaccaatcactgatgaccagaccgcgcgtcccgccaggaacccggatgcgccagcttccatggcgaccctgaccgcgcgagggaacagtttttcgtccacaccggaagagaggatgacccacggcatattgatatgcccattcaggcgttgtgaggcggtaagaagatcggaacgcgcgcctttgccgtagagcggcatttcaactttgtaaagatcggcgccgctgtcgcccagctctttggccgcatcgataatcgcctgctcgcgatcgaacttgtcgccgcagcgcggcggacgaacaaccggttcgataatgctcagcaaaccattggagtgacataattcattgaattctttgaccatatccagacgctgctgcgcgtcttcatcgctgcgccacagcaccaacagttttaaggctttcgcgccatcccgttttaccgcctgcgcattaatttttttatcaatgaccacgttatcaacgggaataccgttgcccgggatgaaatcatccgccgcgacgatcatggcgcagcttttagcgaccgcgttttgttctacggcctggcgataacagaactgctgatccagcagaacggcagaggcatacggggaaagaattttcgccgcattcactttgaaatccgtcagcacgctatcggcaacgggtgttttcgcaccagcagcagcaaacattaaacgcatcgcctcgcgctgatcgacagccagcatggcaaacccgccggacgctcgcgtaatgtctttgatggtgtagttgttcattcaattttcctttatacagtcgttacttttttacgttggcggtcagcccggcgctgatgcgcacctgttccaggatggcgctccagtcttcccgaccgcggcctgcggcccgcgccaggttataaacttcacgggaggcggcgccgagcggcatcggtacgtgcagttgattggcgacatccaacgcgatgccaagatctttgtgcgccagatcgatcatgaaggcgggagacagatctcctttcatcactttattcggccaggtggtggtgaaatgccctttgcctgcggcagtgccgctcatcacttttaaagccacgtcgaaggaaagccccagcgcttcacacagcacggcggcttcggcggagagcgcatttagcgcaatactcatgtagttgttgatcagttttaagcgaatacccattcccgggccgccggtgttgaccagctcattacccatcgccatcagaacaggggtagcacgctctacttgctccgccgtaccgcctgccagcagcaacaatgtgccggtaatcgcgttgtcggatgtccggcctaccggcacatccatcatgctgaaccctttgctctgcatgtcggcaatcagcttatcggtttgcaacggatgaatagtggacatatcaatgaccagcgcttcatgggaaagagtttcacaaacgccttgctcgccaaacaaaacggaacgaaccagatcgccgttcgggagcatggtgataacaaattcagcgccgatggttgcctgagccgggctgcttgcaggttgcgcgcctttgtctaccagacgctgtacggcgtcgggattaacatcgaagacgctgagttgatggccctgctttagcagattgctcgccataggggagcccatctgtcccaacccgataaatgctataactgccatatcgttctcctgaacacggtggtgtcattttttgtcattaatgagccttttcctgtctgtttgtgatcgtatttgtaatttatagtcaaaaaattgacagccgtcactttttaaacatttcgtgaaattaaaatgatcacatcgaaaatgcttgaggaatgaccatggttcgtattgcttgtgtaggtattaccgtgatggatcgcatctattacgtggaaggattaccgacagaagggggtaaatatgtggcgaagcgctatacggaagtgggcggcgggcctgcggcgaccgctgccgtggctgcggcgaaattgggcgcgcaggtggactttattggccgtgtgggcgatgacgacaccggaaacagcctgctggcggaactggaatccctgggggtaaatacccgctatacccgccgctacacgcaggccatgtcctcgcagtcagcgattatggtggatgccaaaggagagcggattatcgttaattatcccagcccggatttattacctgacgccgactggcttaacgacatcgatttttcgcagtgggatgtggtgttggcggatgtgcgctggcatgacggcgcaaaacaggcgtttacgctggcgcgtcaggctggcgtcatgactgttcttgatggcgatattacgccgcaggatattagcgagctggtggcgttaagcgaccacgccgccttctccgagccagggctggcacgcctgacggggatgagcgaagccattgatgcgctaaaaaaagcacaaatgctcacaaatggacatgtctatgtcacgcgaggcagcgaaggctgcaactggttggaaaaagcggcggtacgccaccaaccgggttttaccgtggaggtggtggatactactggcgcgggcgatgtttttcatggcgcactggcatttggcctggcaagcggatacgccatcgaagaggctgtcagattcgccagcggcgttgccgcgctgaagtgtacgcgcccgggtggccgggcgggtatccctgattgtgagcaaacccgatctttcttgtcactttttgtataatatgagcagtaggaagcttttagaggaatgctcatgagtcttaccgaactgaccggtaatccgcgacacgatcggctgttaatgctaattgatgaacgcggctatatgaatatcgatgagttagccagtttgttggaggtctctacccagacggttcgccgcgatattcgtaaattaagcgagcaggggctgattacgcgtcatcacggcggcgctggcagagcgtccagtgtggtcaataccgcctttgagcagcgagaggtctcctggacgcaagagaaaaaagccattgcggaagccgtggctgactatattccggatggctccacgatatttatcacgattggaacgacggttgagcaggtggcgcgcgcgctgctcaaccataatcatctgcgcattatcaccaatagcctgcgcgtcgcgcacattctttataataaccctcgctttgaagtgatggtgcctggcggcacgctgcgcccgcataatagcggcattatcgggccatccgcggcggcgtttgtggcggggttccgggcggactatctcgtcaccagcgtaggcgcgatagagagcgatggcgcgttactggagtttgatgtcaacgaagccagcgtagtgaaaaccatgatggcccactcgcgacatattctgctggccgccgatcatacgaaataccatgcttctgcggcggttgagatcggcaatgtgtcacagattaccgctctgtttacggacgagtatcccggtccggcattacagaatttacttcaatcccagcaaatcgaagtggttcaggtgagtccttcgctggacgacgccgtttcagcgtgacaagcgcccttgcgccggatggtcgcgtcagcgctttatccagccaataaaacggcgctgtgatgcaggcgatattgaacatcgtctgcgtttctattgtctttttgttaattgatttataaagggatacatagtcaaacttctcctttcccgctacagttattcatccccggttagcaaggagaatgacatgctctacatctttgatttaggtaatgtgattgtcgacatcgactttaaccgcgtattaggtgtgtggagcgacctgagtcgagtaccgctggcttcgctgaagcaaaaatttacgatgggcgagacttttcaccaacatgaacgcggtgagataacggacgaagcgtttgctgaagctttctgtcatgaaatggcgttatcgctcagttatgaacaatttgcgcacggctggcaggcggtatttgtcggattacggcccgaagtgattgctatcatgcataaactgcgcgagcaggggcatcgcgtggtggtgctatccaatactaaccgactgcatacccacttctggccggaagaatatccggaggtgcgcgctgccgccgaccatatttatttatcccaggatttgggaatgcgtaagccggaagcgcgtatttatcagcacgtcctgcagaaagaaggtttttctgctgccgatgcggtctttttcgacgacaatgccgataatatagaaggggccaaccagttggggatcaccagcattctggtgaaggataaagccaccatccctgactatttcgcgaagctgttatgctaaaaaccgttcaccaaaaagctggacgccatacgcgccctgttcgggcctggctcaagctattatggcagcgtatcgatgaggataatatgacgactctggcgggaaatctcgcttatgtctcattactctccttagtaccgcttattgccgtcgtttttgcccttttcgctgcttttccgatgttttctgatgtcagcattcagttacgccattttatttttgctaactttatgccagccaccggagacgtgattcagcgctatattgagcagtttgtcgctaactccaacaaaatgacggcggtgggtgcctgtggactgattgtgacggcattgctgttgatgtacgccattgatagcgccttaaacactatctggcgcagcaaacgcacacggccaaaagtgtactcttttgcggtgtactggatgatcctcacgctcggcccgcttctcgccggtgccagcctggcgatcagctcctacctgctttctttacgctgggccagcgatctgaatacggtcatcgacaatgtattgcgcatccttccgctgctgctctcgtggatctcattctggttactttacagtattgtcccaacaactcgcgtaccgaaccgtgacgcccttgtcggcgcgtttgtcgcagcgttgctgttcgaggccggaaagaaaggtttcgcgctttatatcaccatgttcccgtcatatcagctcatttatggcgtactggcagtgatccctatcctgtttgtctgggtatactggacctggtgtatagtcttgcttggcgcagaaataactgtcactctcggggaataccgaaaactcaaacaagccgcagaacaagaagaagctgaccaaccatgattgcattaattcaacgcgtaacccgtgccagcgtcaccgtggaggacgaggtgacgggtgaaatcggcccaggacttttggtgttattgggtgtcgaaaaagaagatgacgaacaaaaagcgaatcgtctgtgcgagcgcgtgctgggataccgtatcttcagcgatgctgacggcaagatgaatctgaatgtacaacaggctggcggcagcgtgctggtggtgtcgcagtttacgctggcggcagataccgagcgtggtatgcgaccaagcttttccggcggggctgcgccggatcgcgcgcaggcgctttatgaatattttgtcgaacgctgccgccagcaggcgatagacacgcaaaccggacgcttcgctgccgatatgcaggttgagctggttaatgacggccccgtgacattctggctccaggtatgagtcagcttccggcgtggccgcggataacaagagagagtacggctatgtatcaccttcgagttccgcaaacagaagaagaattagaacgttactaccagtttcgctgggagatgctgcgtaaaccgctgcaccagccgaaagggtcggagcgggatggctgggatgcgttggcgcaccatcaaatggtggtggacgaagaaggaaatttagttgcagtgggccgcctgtatatcaatgcagataacgaggcgtctatccgttttatggctgtacatccctcggtacaggataaagggctggggacattaatggcgatgaccctggagtctgttgcccgccaggaaggcgttaagcgcgtcacctgcagtgcgcgcgaagatgcggttgagttctttgccaaactcgggtttgtcaatcagggggagattactacgcccacaaccacgccaatccgccattttctgatgattaaaccggtagcatcgctggatgatatcctgcatcgcggcgactggtgcgggcagcttcagcaggcctggtatgagcacattccattgagtgaaaagatgggggtgcgcattcagcagtacaccgggcaaaaatttatcaccacgatgccggaaaccggtaatcaaaatccgcatcacacggtgtttgccggcagcttgttctccctggcgacgctgaccggatggggacttatctggctgatgctccgtgaacgccacctgggcgggacgattattcttgctgacgcccatattcgctacagtaaacccattagcggaaagccaaacgccgtggctgatttggggtcgctaagcggtgatttggacaggctggcgcggggtaaaaaagcgcgtgtccagttgcaggttgaactgttgggcggcgagaccgctggggcaattttcgaaggcatttatatcgtactacctgcgaaaccgttcggcccgtatgaagagggcgggaatgaggaggagtagctggacatctccaactactcgatgaaggcatctgctggtagtttgaagcgttgtgtaagcgctttaatatgattaaccgttagtgctctgcggccatttaagatgttgctgacgttcgatttagaaccaagttcgttggcaagatctgctgctttgagaccgtattgatccatgagcgttcgcaatactgaaacgccagggggcgttttctccaggtgttggttgagtgctttgaattccggcgcatgtttttcgtattcactgattcgggcacagagcaattcaaatagtgggttttcaagatcgtcgtggtcgaccagaaactccactagcgctagtgccctgcgatactcattgtcatttcggtcttcccccatcagtgggacgctttttaccgcatcgctgaaggtatcaacgatcttttttgcgctggttgcatccatctgacgatgagttctcattctttattaccccgatcatatgcggtcagtttgtcatattcggcatgggaaacgatatgtttcacaaatatcttatgtaacctgaaatctatgtaggaaatgagtctcaggctgttaccagaaacatcaatcacccaccatttatctctgtgcttaaaattatccagtgaaggaatataccgcttcatctcttcaggctgagtgagtgtttttttctccagaacattcagcaactcagtgagagcaagctcatggtttggatacatgagcatcgcttcattgaacggttttcggctgataacatgcacaatgtagttccattacaaagttttcaacctgaaaacaatttagcgcaacgttatccagttttcaagttgaaaacaaaattgaattttaggtcattttgcctgttgatggacttacaacacgccaggccacatctcgcatggcgcttcgtgccgcctggctcacgcctcctagctggaaaaagccatggatgacaccgagatagcgctggcaagtgcattccacaccctgttcctggaaccgttgatacagggcctcgccctcatcgcgcagtgggtcgaattcggcagtaatgatgtgcgtggatggcagtccggcgaagtcctcacgccagagcggactggcttcaggatgcagtggatcggttcgcggcatatacatctcgtagcctgaaagcagcgtgtcacgcgtgataatgtaatccagcccattacaggtgtagctcgcaaacctggcggttgcgtccagcatggggtagatcagaatcagctgtgcaggttgccattgacgggcggctttcaggcgtagcgcggtgaccagcgccagatgcccacccgcgctgtcaccggcaagcgtaatgttctcgcgatctatccccagtttctgggcatatttccagatagtattagctccggtttcggcatcgttatgtgcggccgggaaggtgtgctctggtgcaagtcggtactgtgccgcaatcacgcgacaacggctgtaaaaagctaactgccttaactggttatcgtgagtggcaaaaccgccgctgacaaagcagccaccatgataataaatgatgcagggtaatttccctgtggcattgagcggcgaaaccacgcgaaacgtcatggcatcgagttcaatatcttcaacctggacgcgggtttctgtttctcctgccagcgtcgtgctggcgatgtagcccgccctccggtcatcaatattctgttcgcgagaagaggggcgtcccgcggcgataaacccagcgaccagttcggcaattcctttttccagtggcatataacgctcctttaactgtatgtatgtacagtttataacctggttcgttggggatggaaagtggtgaaacgaggggatgatgattctggatagaggttcgcaaaaaatggaatgcggttggcgctgggtttttaatttttgtactgtgaaatgatgatgctatacgccattgacgtatagattattttcactactataagccaatggcgtatggaatatgcaatttatagaaacggaactctttactgaagatgttaaaaaactgctcgatgaggatgaataccataagcttcaggtttttatggctcagcatccagattgtggtgatgtcattcaggaaacgggcggcctgagaaaaatgcgctggggagcgcgaggcaaaggaaagcgtagtggcgtgcgaattatctattttcaccgtagtcaacggtatgagattcgcttgcttctgatttatcaaaaaggcattaaagatgatctcacgccgcaggaaaaagcggtgcttcgtatgctgaatgagaggtggtagatggataaagtgttatttgagcgattaactcaaagtatgtctcaaatgaatgaaatcattgaagggacccgtgagccttctcgtacctttcatattgatgcaatgaagattaaagaaatacggcaggcatctgggttgtcgcaatctaagtttgcagaactgatttcggtcaacgtggatacgctgcgcaactgggagcaaggaagacgttcaccgacagggccagccaaagcgttacttcgcgccattgccaacgacccgagaaacgttatacaagcattgcgttattgagcaatgatccggctaacgtagattgctagccggtataccagagaacttattccccttcccccgggaacaggaacgggttgatggaactgcgggcgaacccttcctgctccatgcgcgcgtccagcaccagcgaggcgaggtcgtcggccacggcttccactttcgggtctttttcctgatagagaatcttcaggtaagtcccgcaatcgccgcagctttcggctttcaccgcagcctgctcattttccagcgaccagtagtgtaagtcgcggctctgttcgcagttactgcattttacgcgcacgacatgccattcggtttcgcacaggttacagtgcagataacgcagcccctgcgtggtgccgatctgcaccatgctggagaccggcatcgaaccgcacaccgggcaatactggcgcgcttcaccgtattccgcgcgggctttgcctggaatcaagctggccatttgcgcccagtaaagggagagcgcggcccagataaacggggctttatcgctgctgacggaggcaaaatccgaggcaaacagcgcgctggccatctgctccagctcctgctcggaggctttctccaggttttcgataaccgccagcgccgggccgctcatttccggcttcagttcagcaatcatcgagtgcagcagcgtatgccagtgcttgtcgcgcggcagaacgtgaatatccagcggcggtttgccctgatcgttcgcgtctttaatgcgcgcggtgaggtccatccgcagcggatgatcgtacagcaccacttcctgcgcgtgcgcgataagcgcggcaaagcgcaggtaatcgcccagcgggttattttcagccagctcgcgcagacgttcggcgcggcggttgtagacgtttttgagtcgggggaacaataacggcggaatcatatccgccgtacgtttctcgctcgaccccagctcatcttgcgggattatgcgaatactcattcagtttctttttccgttgtcttgcggacttctcggtaccagcgtgggtgatgtttcttcgcccacgaccgggttacccagccttccaccatcgcggtaatggtacctttcacccaaagggcggcgtagatatgcaccatgataaccacaattaacgctactgcggcaaaagaatgcaacattaacgcgaatcggatcaccgggattgagaaagcaggcgcaaagtacggacgccagataattaccccgctcaccagcagcagcactaggaagataatcgccgcccagaatacgcatttctggccgaagttataacgcccggtgtcacccacttcctcgttgacgacgatcttacgaatattcttcgcccaaaagatatcatcccgattgattagattgtggtgccaataacggaaaaacatgatgatgaacgaggcaaacataaccacgcccacaaacgggtgcagaattcgcgccagttgtggggtgcccaggatatgcatcaaccagttgaaggatgggaataaaaagcccagcccgctcaccgccgccagcacgaagcagaaggcgacgatccagtggttgatgcgttccggcgccgtatagcgcacgatggtgtcacgtcgtttcatttgcgcacctcgtctttctcttcatgcaggttgtcatcttcctcttccgcacggttcgggccgacgccgacatagtggaagacgctggcggcaaaggtcgcggcaaaaccgaacgcggcgagcggtttccagacgcctttccagaacttaacggtttcgctgatttccgggttctccggcagaccgtgatacagattcggcttgtcggcatgatgcagcacgtacatgacatgcgtaccgcctacgcccgccggatcgtacagacccgcgttgtcataaccacgggtttttagttccgccacccgctcgcccgccagcgttttcatatcctctttcgagccaaaatgaatggcgccggttggacaggtcttcacgcaggccggttcctggccgaccaccacacggtcaacgcacagcgtacatttatagacgcggttgtcttccgggttgaggcgcggcacgttgaacgggcagccagcgatacagtagccgcagccgatacactgctcggactggaagtcgacaataccgttagcgtactgaatgatcgccccttccgccggacaggccttcaggcagccgggatcggcgcagtgcatacagccatccttacggatcagccactccagtttgtcgttctgttccacttccgagaagcgcatcaccgtccaggatttcgcagttaagtccgccgggttgtcatacaccccgacgttattgcccacttcatcacggatgtcgttccactcggagcacgccacctgacacgctttacagccgatacaggtggtgacgtcgatgagtttcgccacctcttcctggtggtcccgcgcctggggcgcgggggtgaaaccgttagtggcggaacgacgaatgatgtcttgcgattgataagccataggtcgtctccgttacaccttttccacgttcacaaggaaggatttaaactccggcgtttgcgtgttcgcatcgccgacgaaaggcgttaacgtattggcgataaagcctttttttgccacgccttcgtagccccagtgaataggaataccgatggtatcgatatccttgccgtccgctttcagcgtgcgaatacgcttggtcaccactgctttggctttgatatagccgcggttcgaggagaccttcacggtatcgccatgcgcgatgccgagcttattcgccagcttctcgccaatttccacaaactgttccggctgggcgatagcgttaagcaacgcgtgcttggtccagtagtggaagtgctcggtcagacggtaagtggttccgacatacgggaacttatccgctttacccagcgcgtcggcatcgtctttaaagatacgggcggcagggttagagataacgttcgggtgcagcgggttagtgcccagcggcgtttcaaacggctcgtagtgttccgggaacggcccttccgccatcttatcgatagcaaacaggcgacccatcccttccggctgcatgataaacggtccgacgtcactgccgggcgcggcggcgctgtagtccggaatatcccatccggcccatttgccgccttcccatttcagtagctgacgtttcgggtcccagggattaccctgcggatcggcggaggcgcggttatagaggatgcggcggttaagcggccatgcccatgcccagcccagcgtgttgccgagaccagacgggtcggcattatcacgacgcgccatcatgttgccttccggcgtccagctaccggcgaaaatccagcagccgctggacgtcgtaccgtcatcgcgcagttgcgcgaacgaactgagctgttgacctttcttcaccaccaccgcgccggttgccgggtcgataagatcggccagcgctttaccgttactttccatcgccacttcttcagaggcgggttcgtatggtttggtgtagttccaggtcatattcagcacctgttccgggttggcgccgccctgttcagagtacatcttacgcaggcgtaagaagataccggcgaggatttcgccgtcggtcatggcaattcccggggcgtccgcgcccttccagtgccactgtaaccagcgaccggagttaacgatggaaccattttcctcggcaaaacaggtggaaggcagacggaacacttcggtctggatttttgcgggatcaacgtcgttcgactcaccgtggttttgccagaaggtggacgtttcggtgttgagcggatcgatagtcaccaggtacttcagtttggaaagcgacgcgaccactttgtttttgttcgggaatgaggccaccgggttaaagccctggcagatatagccgttgaccttgccctgtttcatcatctcgaagtactgcagtacatcgtaccctttgtcccacttcggtagccagtcaaagccccagctattttccgctgtcgctttatcaccaaagaaggccttcatcatcgagacgaagaatttcggatagttgccccagtagttgacctgatccttcaacaatggcttcggcgtattggcagccagataggtttgcaggtcggtctgtttttcgctcggcagcgtcaggtagcccggcagactttgcgacagcagtcctaagtcggtcagtccctgaatattggagtgaccgcgcagggcgttaacgccgccgccggccatccccatgttaccgagcagaagctggatcattgccatagtacggatgttctgcgcgccgatggaatgctgcgtccagcccagcgcgtacaggaacgacgcggttttatcttttgcgctggtttctgcaatgtactcgcacactttcaggaagtccgctttcggcgtaccgcagatattttctaccacgtccggcgtatagcgcgagacatgctgtttcaacagattccagacacagcgcgggtgttgcagtgtcgtatcgcgtttggcaaaaccgttttcgtccagctcatagtgccaactggttttatcgtactgccgcttgtctgcgtcatagccggtgaacagaccatcatcgaagccaaaatcttcacgcacgatcaggctggcattggtataggcctcggtgtattcacggttgtatttttcgttggtcagcagatacagcatcacgcctgacaagaaggcaatgtcagtaccagagcgtattggcgcatagaaatcggccaccgacgcggtacgcgtgaagcgcggatcgatcacaatcagcttcgcgccgttgtgaattttggcttccatcgcccagcggaacccgaccgggtgagcttctgcggcgttaccgcccatcaccacgacgaggttggcgttcttgatgtcgacccagtggttggtcatcgcaccgcgaccaaatgttggagcaagacttgctaccgttggtccgtgtcagacacgcgcctggttgtcgaccgcgagcatacccagcgcgcgggagaatttttgcgttaaataacccgtctcgttactggatgcggaagcgcacagcatcccggtggtgagccagcggttaacggtaacgccttcggcgttctgcgcctgatagttggcgtcgcgatcttccttcatcagtttagcgatgcggtcaaacgcttcttcccaactgatctgttgccacttatctgaacccggcgcgcggtattgcgggaatttcaggcggctttcagagtggataaagtccaccagaccggcccctttcgggcacagcgcgccacggcttaccggatgatccgggtccccttcgatatggaaaatagatgctttggcgtttttcgcaccgtcgccgaggctgtacatcaacagcccgcagccaacggaacagtaggtgcaggtgttacgggtttcgcgggtgcgcagcagtttatattgccgtgtttccgctagcgctacgccgggcgcgaagcccagtgccgccgccgtggtgcctgccataccgccagcgcagatcttaaagaactgccttctgctgacctgcatggtttgctccttgtttcgacattgtcacttctctttcacatttctctatctgaaacgctcagggagtggttgttatttttctttgcggacgggcccgcaaaggttcagaattggataaattttcctccatccgggaggagttgtaacagaataccataatgttggtgtgtgtgttcttatatggttaaaagaaagtgaacaatatactgtctgaagaagtcctaaatgtgactgatttcacaacctcacgccagttgactctctggaaacgcgaggatttgcagtccccccaacttgatgatgttgccgaggaagtgcctgtggcactggtgtataacggcatttcgcatgttgttatgatggcctctccgaaagatctgacgcatttcgcaatggggttttctctgtcggaagggatcattgacagcccgcgtgaaatctatggcatggacgttgtaccgtcctgtaacggacttgaagtgcagattgatctttccagccgtcgatttatggggctgaaagcgcgtcgtcgcgcgctggccggacgcaccggttgcggcgtgtgtggcgtggaacagctcaatgacatcggtaagccggtgcaaccgctgccgtttagccaaacgtttaatctcggtaaccttgatcgcgcgttaaaacatctgaatgattttcaaccgacgggtaagctgacgggttgtacgcacgctgcggcgtgggtcatgccgtcgggtgaactggcggggggccatgaagatgtcggacgccacgttgcgctggataaactgctcggccgccgcgctacggaaggtgaggaatggcggcaaggcgcggcgctggtttccagtcgtgcgagttacgaaatggtgcagaagtcggcgatgtgcggtgtggaaattttgtttgcggtttctgctgctaccacgctcgcggttgacgtcgctgaacggtgtaatcttacgctggtggggttctgtaagccgggtcgggcgacgatttatacccatccgcagcggttaatcgcagactaaaatagtaccctctacatttgcgtaaaatatatattttctcaattttacagcctctcttgataacggaatcacgtatagtggcgaggccatacaggttttaatcgtttttatgctgggccgcagcttattccagccattcacgaggcgcttgctacccggtaatacttcgaacgaaaaaagcgcccctggggcgctctttcgacagtcgctaacgacttatttgttcagtttagcggtcatatgcacgcgatttgcagcgtgaaaagcttagaactcacgctcaagatgatagccattataggtatcgatgagctcgttataagctttaaccacagcctcataagaaccatctaccatatcaccgctgccgctattgaggtagtcctgctcatgcgaggtatacgccacgttatcgcgcacgcgccgaatgcgttttttcaccttgccctggaatttttccagctcagaaataaaaccagggaagctacgatgtttatctatatcaacgttgatcttctcgtttagcttctgagtatgctcttcaaaatcagcgagctgtttgcttactgccgccacatcaaaagaatcatcagctacagcgtcattaagcgtctcggcttcctgcatcgtcaaaagcgtatagtacttaatggatttaccttctttcttctcggtcgccttaatttcattagccgcatgctgcccactcataatggtaatctcggcgcgcaatgggatcaaactcatcgaactgttttataaacgttttatggaacgctttagcgccagcaaaggcatcatccttgaagttatcttgatcatagtatttattcatactattgattgtttcagctagtggtccagccgcattaataaatgccagagcagcactatccagagaggcaaacgccggctttaattcagccgccgccttgatgtctttccggcagtcctggataagtgcaggatacacaggaaccagcggagagggatcgtcttccttaccggtaggaccggtgcggaaatcgtcgaatgtgttagcataacgatttacagcgcggtaaatacctgcctggagattattataacaatcaatgtaaacatttagcttttggttaagaacatcgttcgcatctgcgctttccgctgatgtggattgtgtattgctcgctgatgagtccgcactctgagctacaggttgttcgtccgcttttttttcatcacaagcgcttagcccggcagtcatcagcatagcgataataattgatgataacaaatcctttttcattagaataacctataaataatatcattgaaatttacagattcattttaatgaaaaaaaacaggtatgtgatttattcaacataaaaaatacttaatccatatttcattataattaacattatcaatatcaatgtgttcgttaaaataagagaaccccaacgtaaatatacaaaaggcaattaaatgaaaaggaatttattatcctcagcgataatcattgcgctaatgaccctgggcgcaacaggatgtgataacaataatgttaaaaccgaggcgacgccggccgccagcagtcagcctgcgacgccagcgccttctcagacgccggaaacgcaatctgacgaaagtccagcgcagccctcagcagcgaagccagaaacggcaactcagcccccggcggcgaagccagaaacgccagctcagccggaggttgacgctgaagaagtttatagtgaaaaaatggatgtctatatcgattgttttaataaacttcaattgcccgttcagcacagtctggcgcgttacgcggattgggtgaaagactttaaaaaaggtccgacagggaaagagagcctggtttatggcatttatggtattacggagtcttacataacgaattgccagaaagagatgaaacaggtggccgccttaacgccattacttgagcctattgatggcgttgccgttagctatattgatagcgccgccgcgctgggtaataccattaacgacatggaaaaatattatacccaggaaaactataaagatgatgcctttgctaaaggtaaggcgctgcatcagacattactgaagaatatcgaggattttaaacccgtctcggaaaaatatcatgaggctattcaggaaataaatgacaggcggcaattgacacagttgaagagaatagaagaagcggaaggtaaaacatttaactattattctctggctgtcatgatttcggcaaagcagatcaacaaggttatttctgccgatacctttgatgccgaagcgatgatgaaaaaagtcgcggaactggaaacaatgattgcacaattgaaagaagtgaatactgatggccgtaattcttctttcatcagctctgcggctgattatcagctacaagctaaaaaatatattcgtcgcatcagagacaatgttgagtattctgattttgaaaagaaacgggtgcaggaccctgcaacaggatggatggttgcggattcttatccggcgtcgttgagaagttataacgagatggtggatgattataaccgcctgcgttgagtgacggcacattaactgcgcacaggctggcgcaagtgcctataaaattacgctataacgccaataaaaagcgccgatcaggcgcttttttcgttcatgtattcttcatcaggcaatatccgtaaaaatagctgacgtaaacattaactaaagagagctattagaaaaaccagtaatctgaagctatcacaagatgttgacgtcacgctggaaggtactggtagtgtcattgaggatcggcatttatatggaaagcatttatcccgtctgatgcgaaaattctgagccacttcagcatagggcggcccagcctttatcacttatagggtgtcacgtccaactgttcggtaagacgttaattaatacccgccattcgtaataacgcggtcaccaccgcagcggcgataatcaccacaataagcggcattttacgccaggctaaaaatacggcgaagccaaccccaagaacgcgcgccattccggcaaaatgttcgccttcgtaaaaggtggtcgccagcgcgacggagaatagtagcaccgttgccgcatccgagagcagcgcctgtgaacgctcagacagcgccagacggctgccaagtttagcgccgccgaggcgcatcaaataggttcccgcagacaaaagagcaataccgataataaatagcgtcatattgcccattattttttcctcgccagtaggccaagcagcgaaagcaacaccggcaatccggcagctacaaagggaacggcggcaagcgacagcgcggcgccgctgcaaccacgaatcaatgtggtgcggtttttaaacgccgggatcaccagcgccagtaagattgccgggaatacggcatccagaccgatggtttctggggccggaagcagtttgccgacaccagcgccaatcagtgtgccaatcggccagaatagggcgacgcccagaccgcatagccagtaggcggctttacgttgttcgggtgttttttgcgacaggccgaacaccacgctctcatcattcataatatggcagccgaaaaagctggcggcgcgggtgccaaccaaatcgcgcaccgttacgccaaacggcacgtggcgcgcattcaccagcagtcctgccgccgccgccgctaacggattgccgccgctggcaacaatgccgataaacataaattcggacgcgcccgccagcacaaaaatagagaggacaaacggcacccacagtgggaaaccgtaggccatcgccagtgagccataggacatgccgacgacgcccacggccaggcacactaaaaatatcgcttttatcgtgtctcccttgagacaggaaaaatagtgtttcatcttctttagtcatatcgaacgaattttcattataatgaacggaacagatttgctttacaagacgaacatttcgttcgttatagtgaacgttggatgctttatgacacaacctattagcgtcattgccagaagtctggtacgcgaacgccagcgaaccggactgtcgctggcggagattgcgcggcgcgcaggcatcgctaaatctacgctttcacaactggaagcagggaacggcaaccccagcctggagacgttatggtcgctatgcgtcgcgctcgacattccctttgccaggctgctggagccgcaggtacaaaaaacgcaggtgattcgccgcggagaaggcaccaaagtggtggcggagcaggcgcattatcaggcgatattactggcggcatgtccgcccggcgcgcggcgtgatatctatctgctgttgacgcagccgggggccgaccggatctctcacccgcatccgccggggtcggtggaacatattattgttacgcagggaaaagccctcgtcggcttaaccgaggcgccggaagagctggcggagggcgattacatttgttatcccggcgatcaggcgcatatctttaaagcgctggaaccggatactcaggctatcctggtagcggagcagaattgaaattgccggatggcggcgtaaccgccttatccggcctacaaaaaataaaaccgtaggcccggtaagcttgcgccaccgggcacacgacttactgcagatagaacacctcttttagctctgcgctgaccgggctgttatccggattcgcgggcataacgtcacgcatatgtttccaccaacgctggcaaacgtcggtgctggcaacggcgttccagcgctcctcggattcaatctcaacggtggcgaacagcagattgcgctcctgatcgagataaatcgcgtagtgatgcgcgccgtgagattttaatacggcttccagctccggccagattgggttatgacgacgctgatactcctcgtgcgcgtcggcatttacctgcatcacaaaggctttgcggatcataacgcctccaggtacagcccgcgaacttcatcgcggctggcggtgcgcgggttacacggcgcgcacgggtcggcgagggctttatccagccagccttcgatatcttcttttgtgacgcccagcttgctgaaaccttctggaatgccgacgcgtttgctcagcgtacggatagcgttaatcgcttcctgacttgcggcttcgtcagacataccgcgcgtctctacgcccatcgcctgtgcgatacgggcaaaacgcgcgacggcgttcggacggttaaagttctcgacaattggcagcaggatagcgttgcagactccgtgcggcaggttgtgagttgcgcccggctggtgcgccagcgcgtgaaccagccccaaaccggcgctgttgaacgccatacccgccaggtactggccgaatgccatttgctcacgggcttcgaggttatggccatcgtcaaccgctttcggtagccacaaattgattaagcgaatcgcttccagcgcgttagcgtcggtaagcggatgcgcgccaacggagacataggcttccaccgcatgggtcagggcatccatgccggttgcggcggtcacagacgccgggatttccagcatgacgctggcgtcatccacggcgatatccgggatgatgttcgggtcgatgattacctctttgaccttacgggaagagtcgataatcaccgcgttgctggtcatctctgccgcggtacctgccgtagtattaatcgctaccagcggtacgccggcgtttttcactttgccgacgccggagtaggcggtagatgggcctgggttggcggtgaggattttcaccgcttttgcggtatcgatcgggctgccgccgccgaaggcgataatgtagtcacattctgcgctctgatacgccgcaaaacctttctgcaccagctcttctgtcggatttgggaacacctcatcaaacaggtggtaagacatttgatgttcatccagtgcgctaaacaggctatccagcaggccctgctttaccagttgaccatcggtaacgatcagcgctttgccccattgcttattcgccacgaggttcaccatatcggcaatcgctccagcgccatgcaggctaatttttggcagtgccaacataaagctcatcactattctccttaaaaaaattccctgttgcccgatggcgctacgcttatcgggcctacggtaaaatgcgcaccgacctgtaggccggataaggcaaagccgcatccggcgttgagttgggaggtatcagtacagcgctacggcgctggccagcggtgtcacgccaaaacgtttgccgagtgcgaccagttcttcgcgcgtgatggtctgcttcataccgcccatcgaatagattttgactaatacctcagcggatttctctgcggtatctatcaaaccgaaggtttcatccagcgtaggtccgcttccgaacacgccgtggaacggccacagcaccagcgaatgtttctgcatttcttgcgcggtggcctggccgatttcatcggtgcctggcaccatccacggcagaatgccgacaccgtccgggaataccaccagacattcggtgctgccttcccacagtttgcgggtgatcagcgcagtgttgttttccagtacgtaggtgagggcgatcaggttagtcgcatggcaatgcataatgacgcggtctttgccgtgggtggctttgatgcgttcgcagtgggaaaggaaatgcgccgggagttcagaggtgggtaccgcgtcgtgggttaagccccacagaatgtggtagcctgcgccgtcgctgtcgattttgaccacgcctaaattggctgccggatcgagctgcacgttgcggaagaatttgccggaaccggtaacgataaacggcgtattcgccagcagcggcatgggttgacttagcgcgatatagcgtggtttttcgtggaaattagtcgcaaaaggcgcgatatcggcttcatccagacgcagcgtcaggttaccgccattacgttcgtcccaccctttcagccacgcatcagacgtggctttaatcatgccctggacaaaccaggaatcggtaatattttgcatgttcgtgttcccatttattgcccgaaggttattcgggtcttacgtaggccggataagcgcagcgccatccggcaatcgtgtttcatttattgccggatggcgacgcgggcgtcttatccggcctacagatcaggtgtcgctgtcagctacgtttgctcaggatctctttttcgtaggtgcgaacgctgtccagccactggctgccagtcggcgtgtcgtgacgctggcaatacatttcccagacggcctgccacggcagggatttttgctcttccagcagcgccagacgcacggtgtaatcgccgctggcctcaagctgacgcagttgatctgtgggttccagcagagcgcgcagcagcgcttttttcatgttgcgggtaccgataacccacgcggcgacacggttgatagaggcgtcgaagaaatccaggccgatatgcacacggtcgaacaggttatgacggacgatctcgctggcaattgcctgggtttcatcgtccaggagcaccacgtggtcgctatcccagcgtaccgggcggctgacgtgcagcagcagccgtggcacgtagagcatggcggcggaaattttgtcggaaatcacttcggtgggatggaagtggcccgcatcaaggcacagcgcggtctgacggctggtggcgtagcccatgtagaactcattggagccgacggtgtagctttccgcgccgatgccaaacagtttgctctcaacggcgtcgatgtggtgcgccgggtcgaatttctcgctaatgacctcatccagcgcttccaacaggcgctggcgcggggctaaacggtcgacggtaatgtctttcatgccgtccggaatccagatgttcatcaccgacggcgtaccgagctgctcaccaaagtatgccgagacgcggcggctggctttgcagtgatcgatccagaactggcgaattttcgcgtcgggatgagagagggtaaaaccgtcagcgctcagtggatgagaaaaacaggtggggttgaaatccagccccagccggttcgctttcgcccactccacccagtttttaaaatgctccggtttgatctggtcgcgagcaaccggcgtatccgactcaaggtaaatggcgtgtaggttcagccgttttgggcctgggatcagacgcagcgcctgttccagatcggcgcgcagttcggtggcgttacgcgctttgcccggatagttgccggtcgattgaattccgcccgtcagcgaaccttccgggttctcgaatccggcaacatcgtcgccctgccagcagtgcatggaaaccggcaggcgatcgagctggcgcagcgcctcctcgacatcaatacctactgcggcgaaacgttgttttgccagttcccaggcttgttccagttgagtggtcatgcgcaaagctcctttgtctgtcgtttgggttgaaactgcgcaacgtggcgggcaatttcactatcaggattagggatataggttgtcaggtcgtagttagcgctgacgacctgacggaagtcatcgacgttgtttaattcgtcgagggtcataagctgaataccaatattgccaagggtggaggcttcaaccggcccggccatcacgcgaatgccacatgcatcggcgcacaactggttgagtagcgagttttggcatccgccgccgacaatatgcagttgggtaaatttttcaccgcgcagatttgccagttcgtgcagaatgtcggcatacaaaagcgccagactgtcgaaaatgcagcgcgccagttcggcatcgctgacgggaacgggctggtcggtctcgcgacaggcggcctggatttcagcgcgcatatcgtcaggattgataaagcgatcgtcattcgggttaatcaggaaacggcaggccggcagcgcttctgtttgggcgataagcgcaggcagatcggtaatgcgccgttctttcagcacacgctggagcagccacaaacccataatgtttttcagtacccgataacgcccttccgcgccgccttcgttggtgatattggcggccagcgcctcatcagtggtgtagggcattttgctttcaaaacccatcaatgaccaggtgcctgaagacaggtaagcgctatgtttatttgccagcggagaggcaataacggcgctggcggtatcgtggctggcgacggctaccaccggaatacggttgccctgcgggcaaatccagtcgccgataacattgccagggtgcgaggggcggccgaaccagctctttttcgcgccggtccacgccagcagggtatcgtcccagtcatcggtattgatattgaccaactgggtggtcgtggcgttggtgtattcccagttcatttcaccggtcaggcggtagctgaaataatcgggcatcagcagcgcatgagcgacctgcgccgttaactcaggctgttgtttcgtcagcgcgcgtagctgatagatggtgttaaacggcagaaactgaatcccgctgcggcgatagatttcgcttttgccgatctggaccagcgcttgcggcatgatgcccgtggtacggttatcgcggtaggagaccggcaggccgacacgctgaccttgtttatccagcaggacataatcgacgccccaggtgtcgatgccgatgctgtcgataagaatgccttcattgcagactttcttcagaccaagacggatatccttttccagactgtcgatgtcccaggtgtcaaacccgtctgttttttgtaggcagttcacaaaacggtgaatttcacgtagcgtcagggtacggtgtttgctgtcgtaacgcgccagcatcacgcgcccgctggatgcgccgagatcaaccgcgacacaatggcgaaaagtcataatcaggtccttcttagagtcattgcgcacagtctaaaaaagccctcaaagacctaccttctcgttactgacaggaaaatgagccgctggcaacaaggcaaagatgaacgtgatagcgttcacagtttctactaataggccggtgtgatgtcgtccgcatttcccgctttttcccgccttttcttgaaaaaaagaccatgtttgcgcgctttagcgtcaaaaatttaaggtgaggccgataacccttaattactattcggacatgttgaattcaggaggaagcaaccatgaccgtactgcatagcgtggatttttttccatcaggtaaagcgcccgtggcgattgaacctcgtctgccgcaagccgctttccctgaacatcatcatgattttcatgaaatcgtgattgtggaacacggtacgggcattcatgtattcaacgggcagccgtataccatcagcggcggtaccgtgtgttttgttcgcgatcacgaccggcatttatatgaacataccgacaacctatgcctgacgaatgtactgtggcgttcaccggacgccttccagtttctggcggggttggatcaattgctgccgcaggagcaggatggttactatccttctcactggcgggtgaatcagagtgtgttgcagcaggtgcgccagttggtcggtctgatggagcgcgccggagacggcatggatgcgcctgccgtggcgaatcgcgaaattttgtttatgcaactactggtgttgttacgccgcagtagcctgatggaaggcgcgaccaataacgacgccaaactcaaccaactgatggcatggctggaagaccattttgcggaggaggtctgctgggaggcggtagctgaacagttttcgctgtcgctacgcacgctgcatcgtcagcttaaacagcataccgggctgacgccgcaacgttaccttaatcgcctgcgtttgatcaaagcccggcatttattgcgccatagcgatcatagcgtgacagaaatcgcgtaccgctgcggttttggcgacagtaaccacttttcgactctgtttcgccgagaatttaactggtcgccgcgggatatccgtcagggacgcgatgcgataatccagtaacgcgaacgctatcaacgttttcgtcgccaatatgctgataattataccctttaataccggatggcggctgcgccttacctggcctacggcggcgagcggtagacagaataagcgtagcgccatccggcaagcattcaacatgaggtgctgcggtggcaaatcagttaatccttttgaaaaaagatttttttactgatgagcagcaggccgttacggttgccgatcgctatccacaggatgtttttgcggaacatacgcatgagttttgtgaactggtgatggtctggcggggcaatggcctacacgttcttaatgagcgcccatacagaattacccgcggcgatctgttttacattcgtgctgaagacaaacactcctatacctccgttaacgatctggtgctgcaaaatatcatttactgcccggagcgtttgaaactcaatgtaaactggcaggcgatgattcccggctttcagggagcgcagtggcatcctcactggcggctgggcagtatgggaatgaatcaggcgcggcaggtcattaaccagcttgaacatgagagtaatggacgcgatccgctggcgaatgagatggcggaattgctgtttggtcaactggtgatgacgttaaaacggcatcgctacgcgaccgacgatcttccggcaacctcccgagaaaccctgttggataaattaattaccgctttggctaatagccttgagtgtccctttgcgctggatgcgttttgccagcaggaacaatgcagcgaacgggtgctgcggcagcagtttcgcgcccaaaccgggatgacgattaatcaatatttacgccaggtccgtatttgccacgcgcagtatctgcttcagcatagcccgctgatgattagcgagatttcgatgcagtgcggttttgaagatagtaattatttttcagtggtgttcacgcgggaaaccgggatgacgccgagccaatggcgccatctcagtaatcaaagcgattaactggccatgcctaaaccgacaatattcgccgcgataataattaccacgcagccgaggcttaatacggcaacgggacggcggccagcatttttccactcttttagcaccagaccgacaagccccccgcacagcacatagaagctcatgtgcagcatccagctcatgtagtcatattgcgctggaatgcgcgcgtgaccccaggcatagaaaaagaactgcaaataccacatcagaccgccaagcgcggacagcagaatattgctgataatcaacggtcttgccagcgagaagtcggcttttatcgacagattttgtacttttgccaggcggataaaacagaaaccgaggttaaccagcgcgccgccgcccataatcaccacgtaactcggcagcgcgacatagagcgggtcaacgccaagcgcggcagcagcttcatgcatcggtttcgcggcgttcatggcaaaagacatccccgccgagaaaataccgcacatcactgccagcagaagccctttcttcagattgaactcctccgctttaatgcccattttgcgttcttttaactgtccggcgcgcgtcacaatcccgacgccgatcagcgcgacaaaaacgccaagtagcgtcatgcgtcccccttcggtatggattaacacatcgaagttaccgttgatgataggcgtcatcagcgtgccgacgataagcgtaatgccgatagcgatgccgatacccatggacatcccgagataacgcatggtcagaccgtaattaatattgccgatgccccacatggcgccgaacagaaaaaccggtaaaagggtggagaggttaaactgcccataataggcccagaaatcaggcagtaacagagcgctaattgcccacggcagaataagccatgagacgatgccgcccactgaccacatggtttcccatgaccactgtttcacttgcttgaacggggcatagaagcaggctgcactggccgcccctatcaaatgccagaaaatacccatcgtaatcgcgttactcatgacatgttcctcattattttttatggacgggataccccttccgtttgcatgagtttaaaaattacgcagcctggtaaccttataacgattgccgccgttgggtgtattctggcaatcagcacgttaatgaagtgattaacttcacgttttaaaaaagtcggagcgcatcgtgaccgtctggatgttatttaaatcagtggataatattttttttctaaaataccttcatcataacgacacgaaacgacttagctggcagtaatgcaaagaaaacgctgcgtgagatcacataatgggaatagtctgacttaccgtttgataaaagggtagttatacagtaattatttagttgttttatttgtatttacaatttaaatatattgaaattaacgttaggaatcaatgaaatataaatataaggaaatccctatattggcgttgttgatggagttttgatttttattttatatgacgaatatgaatttcatttattttattttgctttttgaatattatcccaattttaaattaaagatctttgtctatattgtcgccattcacattgcgtattatggttgtaatggtctgacatgaaacaacgttttaattttaaattaaatggattctgttatgagaaaatctcttttcttactattacctcttgttgtaacaaatgcgcatgcagtatatgtcgatgttcgtcatgaatatcttgatgatagtaaagctaactatgaccgtgcgtatatttctcatcggtttgcgaatggtgttggttttgcgatagaagctatctcaaaatcaggcggggatgacaccaataaagcgtttaatgacctggaaacacagggcaacgaatatacgataagctaccaatttaaaaccggtgatgtcgcctggcaaccgggtttcgtgctggaaacaggcaacggttactctacctataagccttacttccgcgcgacgtggacattaaatgaaagctggtgggttggtgcgcgctatcgttttgaatatgtacgccgttcttctgatatccgtgatgatgataccatcaatcgtatggatgtctgggcgggttataaatggaacaactttgactggacaatcgaaggaatttataagaaagctgataaatatgatctttacgatggcggcaaagataactatgaatataacttcagaactgcctatattattgatcaatggtcgccattcgttgaggtaggtaatgtttccgtcaatagcaacagcgatgaaagacaaacccgtttccgcgtgggtataggctacacattctaatcattatccctgtttattatttattcccttttccggctactttataggtagccggtttttttacctggtgatgacctgcggataattattatcgtgcgttggccggataagacgcgaatcgccatccggcaacgagatgtgcaggaaactatgcgcttacatgatgcccagtagacggggtaagaacagtgtgatttccggaatgtaggtaattaataacagaacgccgataatcgcgccgtaaaaaggcagcaacggtttaatcacttcctcaactttgaccttaccgacgctcgccccgacatataaaccactgccaactggcggcgtaatggtgccaatcgccaggttatagatcatgataatgccaaaatgcaccggatcgacgcccagtttagccatgatcggcagcagaatcggggtaaaaatcagaatggccggaccgatatccataaatgcgccgataatcaacaaaaagacggtaatgactaacaggataaccagtttattggcggaaataccgaggatcatatcgctcagcgccgcaggaatattggtgatcgacatcgagaaggacatcgccgaagaggttgccagcaggaacatgatgaccccggtcattaccactgtctggagcaaaatcgaaggcaaatccttaattttcagcgtgcggtaaaacaccatcgtcaacaataatgtatacaccacggcaatcgcggaggcttcaatggcggtgaaaatcccctgcacaatgccgccgacgataatcacgatcagcagcaggctgggaatggcctcaacggcaacttttagcgccatgcctttttggacggtgaagaaaacccgataatttcgacgcttagcgaccaccagcgtgaccagcatacagccaacgccccacagcactcccgcgaccagaccgccggcgaacagagcggcaatcgatgttcccccgcttgccagcgcataaaggataaaagccgtggtgggcggaattaacattcccgtcggcgcggaggcgatattcaccgcggccgcaaagccgcgatcgtaaccttcgcgcgcgctcatcggcaccatcacgccgccgatggaggttgaggcggcaattgccgatccggaaattgcaccgaacatcatattgccgacgatgttggtataagagagcgagccgggcagtttgccagtaaacagtttggcaaaattgaccagccgggcggcaattcccccgctattcatgatcaccccggacaaaacgaagaacggcacggccagcaaggcaaaactgtccaggctggagaacattttttgcgcggtggcgaacatcgaaatatcgaaaggcagtaccagcatcatggtgctgaaagaggcgataacgggcgacttcgccgtggcgggcgatggtgagagcgaactcattgttttccgcgccgtcgagaatgccttgttgtaacgaggtatagacctccgcctggctcatggcgatgggcgaagcgcccagcagtttgagagtttggatcgccgtctcactctgcatgacgcggatcttcttcccgcgtaaatcctcaatgcgtttaaccggcgctttgctcatataaaaattacgcgcgccggaatcataccagcctacgccgacaaacccctgtgcggcggtggactgataaacaggctccatcacctgtgggttatccattacgcggtagtattcctcgacggtggcaaacaggtagggaagtgagaacacgccgtactcaggcgaaaaactctccatcagcccggacgacactttagtgatgtcgacgacgccgacctgcgtcaactccaccagttcgcgctcgccgccaagctgtccgtccgggaagtactgtactttgatatcgccgcccgttttctcttcaacttgctgccccaggaagtgcaacgcatcttttaccggctggctattttcagcgtaggccaggcgcaaaatggtttcgccgtgggagaagaaagagagtgtggagagtaaggccaacgtagccagacgtataaaaccaggttgcttcataattccctcgcaattgtaataatttaccgggaatgtaattgcatggtgaaattataaccttcttgattttgccaccgctgacaaaaattggcaccaaaagaaagattttgaaaccctgtttcacatttcatgatttccaggaattcatcaacaggcggtttcggttggaggcgtaaaaaacgattttttttcagcggatgccgtaacgtttataaccctggaaaaagtacggcattgataatcattttcaatatcatttaattaactataatgaaccaactgcttacgcggcgttaacactgtgccgctcgacaataatggagatgattatgagttatacactgccatccctgccgtacgcttatgatgcactggaaccgcacttcgataagcagacgatggagattcaccacaccaaacaccatcaaacctatgtcaacaacgctaacgcggcgctggaaaacttgccagagtttgctgacctgccggttgaagaactgattactaaactggaccaggtgccagcggacaaaaaaaccgtgctgcgtaataacgcgggcggccacgctaaccacagcttcttctggaaaggcctgaaaaaaggcaccaccctgcagggcgatctgaaagcggctatcgagcgtgacttcggttccgttgacaacttcaaagctgaattcgaaaaagcagcagcaacccgtttcggctccggctgggcgtggctggtgctgaaaggcgacaaactggctgtggtttctaccgcaaaccaggattccccgctgatgggtgaagccatttccggcgcttccggcttcccgatcctgggtctggacgtgtgggaacacgcttactacctgaaattccagaaccgccgcccggactacatcaaagagttctggaacgtggtgaactgggacgaagcagcagcgcgtttcgccgctaaaaaataatttgcattgcacgactgtagaagcgagtctgatgactcgctttttttgtatccgcgtaaggagcagcagatgcattatccggttgacgtgtttattggcaaaattcgtgactatgacggcagccgcccgagcgctatcgccaaagtgcaggccgatggcgaacttatgctgaccgagctgggtctggcaggcgatgagcaggccgaaaagaaaatccacggcggccccgaccgcgcgctatgccattacccccgcgaacactatgctgattggattcgccagttccccgagcaggcgacgctgttttgcgccccggcgtttggcgagaatctgtcgacggacggaatgaccgaacacaacgtgtttattggcgacatctaccgctggggcgaggtgttgatccaggtcactcagccgcgctctccatgctttaaacttaatttccattttgccatcagcgacatggccctccttatgcagaacagcggaaaaaccggctggctgtatcgggtcattgcgcctggtaaggtctccagcgatgcgccgctggaactggcgtcgcgtctgagcgatgtctcggttcatgaagcgggtgttatcgcctggtctatgccgtttgatgacgaacaatatcaccggctgttgagcgccgccgggctgtcggcgagctggagccgcaccatgcaaaagcgtcgtttgagcggcaaaattgaagatagcgccagacgactgtggggggataaaactccgccaaaatgaaaggaagggttatgactgaagctgaaaatgcggtggcgatcgtaaaagaatttttggtggcctcgatgattcccgatgctgaacgcgccgcaacgtatatgcacccggaggtgaaaattaccttcaccggaggccgggcgatggcgggcgcggcagatatcgcgcagtttaacggcgctcgctacaagtgggtgaagaaggcgctgggcgagtttgatgcggtgcagcatgatgattacgttgtgatttattccaacggtacgttgtatggcgaatggcccgacggtcgcccgtttgccgataaccgctttatcgaccgcttcgaagtgcgcgatggcaaaattacccggatggacgtgtggaatgacagcgccgagtggattttagcgccggaaatctcccgatagcgtggtgcgtaggccggataagcgtagcgccgtcaggctgtcaggtgtacattgccggatgacggcgtttgccttattccgctggtaacctattaattattcacaaaagatatgtaaattatggacgcacatattctcgaggcttgtacggaagaagttaagcacatcttattcgaagagtatcacctcaaatctatcgaggagctttgggagcggtctctggatgaggattttttagctgagttgtatcaacagtttaagttcataacggaaaagtatggcgtgaatggtgatgaattggacagcatcctcgatacgctttaaatggttaaggctcggtaagagaaagtattaccgagccatgaataacattaggttcgcttgtacagcggtagccacagcgtaagccgcaacccacccagcgggctatcgtcagccttcacccagccgcggtgctgctgcatggcgctttcgacaatcgccagccccagcccggtgccgccagactcgcggtcgcgcgcctcatcagtgcgatagaacggacggaagatctgctcgcggtcttcagggctgacgcccggcccgtcgtcatcgaccgtgatcgtaataccgtctttatccaccgagaagccgacttcaatcttcgtatgtgaatagcgcagcgcattacgaactatattttccagcgcgctttccagcgcgtttgggttgccatagagcggccacggccccggcggataatttaccgttaacgacttgcccatctgttcggcttcaaaggcggcgttatccagcacttcgccccatagctgattggctttcatcgtttcgctgaccagcgcatttttctgttggttacgcgacatcaccagcaggtcattgatcatgctgtccagacgctgcgcttcggtttcaatacgctccagctctttgctttcgccgccacgacgacgcagcagcgcggtacccagttgcaggcgcgtaaggggcgttcgcagctcatgggagatgtctgacagcaaacgctgctgcgaggtcatcatccgttccagcgccgtcaccatctggttaaaactggcgccagcggcgaggaactcctgcggacccgcctccagctccggatgctgacgcaggttgccttgcgccacttcatcagccgcgtttttcaacttacgcgccggtttcgccagactccatgccagccatagcaagagcggcgaactgaccagcatcgtgacaatgagcaacaggagcgggcggtcaaacagcagattaataaaatcggattgcgaactgctggccggtcgaatcaggtaaagctggtaattatcctctccgtcacgaacggagaacggccccaccatctctacgcggccatattttttcttctgcggatgatcggcgttatccgcctgaccaatgaagttacgaatgatctgcatttcgctgcgttcagcgccgatcacgcgtccttcagaggtcaccagtaataaccgctgtccaggcggcgcccacttatcgatcgcgcggaacaggcgacgccaccacatcaggtcgttgggcggatcgttcgcaagttcagcttctacatgttgctctatcatcaatccctggcgctgttcgctgtccagcagctcggtcatctggcgtgaatcgagcttgggcaacatcagtaccagcattagcaccagcgccagcgtcaaccagaagatggcgaagatgcgcgcggttaaacttcctatcatgaagcggaaaccatcagatagccgcgaccacgcaatgttttaaaccacgggtgaccgtctttgcgttccggcagtttgcggcgcaggttagaaatatgcatatcaatggcgcgatcgaacggcgtcaggcgcttacccagcacttcctggcttaaatgttcacgggaaaccacctggccgaggtgttgcgccagcaaatagagcagggtgaattccgtaccggtcagctccagcgtttggccatcgaaactggcttcctggcgacccggattaaggcttagcgcatcgacttccagcgtcggcgagccgttgtcgctgctctgctgctgttcgctccagtgggaacggcgcaaaatagccctgatgcgcgctaccagctcgcggtcgttaaacggtttgggcaaatagtcgtccgcgcccagctcaaggccgagaacgcgatccagctcgctgccgcgcgcggtcagcataatgacaggcgtctggtgtgtctggcgaagcgctttcaacgtatcgataccgtttttcttcggcatcatgacgtcaagcaaaagtaaatcgatgctgtcatccaaaagctcaagcgcctgctcgccgtcgtgggccaccaggacattaaaaccttccatttcgaggagctcttttaacagggaagtcagctctcggtcatcatcaactaacaggattttattcattgtttacgtacctccgaggcagaaattacgtcatcaggcgtcgctaatccatgactttacgttgttttacaccccctgacgcatgtttgcagcccgaatcgtaaactgtctctcgttgaatcgcgacagaaaagattttgggagcaagcgatgcgcaaagttaccgctgctgttatggcctcaacgctggcattcagttttttaagccacgcagctgaagttgttacaagcgataactggcaccccggtgacggggccacgcagcgtagcgcgcaaaatcatatgtttgacggcataagtttaaccgaacatcagcgtcagcagatgcgagatcttatgcaacaggcaaggcacgaacagcctcctgttaatgttagcgaaatggagacaatgcatcggcttgtcaccgcagaaaaatttgatgaaagcgctgtgcgcgctcaggcagaaaaaatggcgcaagagcaggttgcccgccaggtcgaaatggcccgcgtgcgtaaccagatgtatcgcctgttaacgccggagcagcaagcggttttgaatgaaaagcatcagcaacgaatggagcaactgcgcgacgtggcgcaatggcaaaaaagttcatcgttgaaattattgagtagtagcaactcacgttcccagtaacaaccctgttttccttgccatagacaccatccctgtcttcccccacatgatgtgggggttttttttatctccagtttgtcattctgttattagcttactgttttaaaccatccgttatactaccggcagaagatagcgggagtatttatgaatcaaacctatggacggctggttagccgggcggctatcgcggcaacagcgatggcatcagcgttacttttgatcaaaatttttgcgtggtggtatacgggatcggtgagtattctggcggcgttggtggactcgctggtggatattgccgcgtcattgacgaatttgttggtcgtgcgttattcgctgcaacccgcagatgatgaacacacgtttgggcacggtaaagcggagtcgctggcggcgctggcgcaaagtatgtttatttccggttcggcgttgtttctgtttttgaccagtattcagaatctgattaagccgacgccaatgaacgaccccggcgtggggattggcgttaccgtcatcgctctgatatgcactattatactggtcacgtttcagcgctgggtggtacgcaagacccaaagtcaggcggtacgggcggatatgcttcattatcagtctgatgttatgatgaacggagcgattcttatcgcgctggggttatcctggtacggttggcatcgtgcggatgccctgtttgcgttaggtatcggcatctatattttgtatagcgcgttgcgtatggggtatgaggcggtgcagtcattattggatcgcgcgctgcccgatgcggaacgacaggaaattattgatatcgtgacgtcatggccgggagtcagcggcgcgcacgatctccgcacgcggcagtcagggccgactcgctttattcagattcatttggaaatggaagataatctgccgctcgttcaggcgcattttgtggctgaccaggtagagcaggcgattttacagcgttttccgggttcagatgtcattattcatcaggatccctgttcagtcgttcccagggaaggcaggaagttcgagcttgtataattgattgttaaaaagtgagccaggccagcattttgtgtataaattaccgccatttggcctgacctgaatcaattcagcaggaagggattgttatactatctgtatattcgttggatcgtttcgaagtgcgaaatcggcttccggcaatagatttcattttgcattccaaagttcagaggtagtcatgattaagaaaatcggtgtgttgacaagcggcggtgatgcgccgggcatgaacgcggcaatccgcggtgttgtgcgcgcagcgttgacggaagggctggaagtcatgggcatttatgacggctatctgggcctgtatgaagatcgtatggttcagcttgaccgttacagcgtatctgacatgatcaaccgtggcggtactttcctcggttctgcccgtttcccggaattccgtgacgaaaatattcgcgctgtcgcgatcgaaaacctgaaaaaacgcggtatcgatgcgctggtagttattggcggcgacggttcttatatgggtgcaaaacgtctgactgaaatgggcttcccgtgcatcggtctgccaggcactatcgataacgacatcaaaggcaccgactacactatcggctatttcactgctctcggcactgtagtggaagcgattgaccgtctgcgtgacacctcctcttctcaccagcgtatctctatcgttgaggtgatgggccgttattgcggcgacctgacgttggcggcggctattgctggcggctgtgagtttatcgtggtgccggaagttgaatttaatcgcgaagatctggtggccgaaatcaaagccgggatcgcgaaagggaaaaaacacgctatcgtcgctattactgagcatatgtgcgatgttgacgaactggcgcactttattgaaaaagaaacgggccgtgagacgcgtgcgacggtgctcggccacattcagcgcggtggttccccggtaccttacgatcgcattctggcttcccgtatgggcgcgtatgctattgacctgctgctggaaggccatggcggtcgttgtgtcggtatccagaacgagcagcttgttcatcatgacatcatcgatgcgattgaaaacatgaagcgtccgttcaaaagcgactggatggagtgcgcgaaaaaactgtactgattgtttttgcgcgcctgatggcgctacgcttatcaggcctacaggttgcagaaacgtgtaggccggattaggcgctagccgccatccggcaatccctcagatttattcctcgaagttatagccaatctttttttattctttaatgtttggatctctttctggcacgctttgctcatcacaacacaacataagcgagtcgggcgatgaaaaagtggggcgtggggttcacattattgctggcgtcaaccagcattctggcaaaggatattcagttacttaacgtatcatacgatccaacgcgtgagctgtacgagcagtacaacaaagcgtttagcgcgcactggaagcaggaaaccggcgacaacgtcgtgatccgtcaatcgcacggcggttcgggtaaacaggcgacttccgttattaacggcattgaagccgatgtcgtgacgctggcgctggcttacgatgtggacgctattgcggaacgtggtcgtatcgataaaaactggatcaagcgtctgccggataactcagcaccttacacctccaccatcgttttcctggtccgcaaaggcaatccaaaacaaattcatgactggaatgatctgattaaacccggtgtgtcggtgattacgccaaacccgaaaagctccggcggcgcacgctggaactatctggcggcatggggctacgccctgcaccacaacaataacgatcaggccaaagcgcaggactttgtcaaagccctgtttaaaaacgttgaagtgctggactccggcgcgcgcggctcaaccaatactttcgttgaacgcggtatcggtgatgtgctgattgcctgggaaaacgaagcgctactggcgacgaatgaactgggtaaagataaattcgagatagtgaccccgagtgaatctattctcgcagagccgaccgtgtccgtggtggataaagtcgttgagaagaaagggacgaatgcggtggcggaagcgtatctgaagtatctctactcgccggaagggcaggagatagcagcgaaaaacttctaccgtccgcgcgatgctgacgtggcgaaaaaatacgacgatgcgtttccgaagctgaagctgttcaccattgacgaggtgtttggcggctgggcgaaggcgcaaaaagatcacttcgctaatggcggtacgttcgaccaaattagcaaacgctaaaccgtttataaacccggtaacgtattatgttaccgggttttttctttgccacaattttgcgttactcttccccgtctatgggtcacagggaacgcatatcatgaaaaaaacaggctactttttactggcggtgatagtgattgtcgccgcggcgggcgtcggttactggaaattttccggcaatcctgatgcattacgggaaatcgtgcttgaacaatgcctgcccgatcagttacagcatcaaaacccagcgccttgcgcggaagtcaaacctcgcgccggctatgtcgtctttaaagatcgtcacggtccgttgcaatatttattgatgcccacctaccgtatcaacggtacagaaagcccgctattgctggaacccgctacgcccaactttttctggctggcctggcaggctcgcggctatatgagtaaaaaatacgggcatgatattccggatagcgcggtctcgctggcgattaattcgcggcttggtcgttcacaggaccatttgcatatccatatttcttgcatccgtcctgacgttcgggaacaactggataacgatctcacgcgcatcagcactcgctggcttccgctgccgggtggcctgatggggcatgaatacctggcgcgccgggtaactgagagcgaactggcgcagcgtagtccgtttatgatgctggcggaagaggtgccggaagcgcgcgatcatatgggacgctatgcgctggcggtggtacgccaaagcgacgactcttttgtcctgctggcgaccgagcgtaacctgctgacgcttaatcgcgcatcggcggaagagattcaggaccatagttgcgccattttgtcttcccgctgattttcgttacacccccctgctcattatcttattgattcttatcccggtttaaaactggggtaagatcgtgtctataaaaatatgtgaaaccgatcaaaagatataaaggtatacctttatatcttttgatggttcgttacactctcttcatagcctccatagattgtctggtggatggcttatataaaaacgtttttatttcatgtagtgacatcattaattgttcaccagatttgcgctgctaagcgtaaaggaatatcaacatgaaactttctattgtggaaaaaatcggcttcggcgcgggagatatggcgataaacgttgtgattatcgccatgcagctgctcctcgcctatttctataccgatatctacggcctgagcgccgctgatgttggcgtactgtttgtggttgtgcggatgattgatgccattatcgatccggccatgggggttcttaccgataaactgaacacgcgctgggggcgttatcgcccgtggctgctgtggtttgctattccttttggtttcgccgtgtatttgatgtttattacgcctgacatggcttatatggccaagctggcgtgggcctatggcacctatattcttatgaccttggtctatactgcgatcaccattccctatatttcgatgattggcgtcattaccagcgaccccgtcgaacggttaagcgccaacggctatcgttttgtgatgaccaagattgccgctttcctggtgactatcgtcgtaccgatgcttgccgtctggctggggcagggcaacaaggcgctgggttaccagttttcgatggggctgatgggggcgatgggcgccttgctgtttatcttctgttttcttaccacgcgtgaacgcagcgagccggaaattacgtcgttatcggtggggaaacagtttaaatatctgttacgcaacgatcagtggattattctcggcgttgttattctgctgctgatgtgcggttatgttattcgcggttccgttgccgcttattacgccaagtattatctgaacggcggagatagtctgatttcacccttcctgactaccggcgtcgttgcctctattttagcgatgatcgctaccacctggataaccaagttctgggacaaaattaagatgttccgctacacccagattattacctttatcctgagcgcgctgatgtatttctccgtcgggcgtgaaaatcttatcctggcgtttgcgttctattttcttattaatttcttctgcgatatgcaaatgccggtgttctggtcctctatcgccgaagcggtggattacggagaaaagaaaaccggtctgcgcgtttccgggttggcgtttggcggcatcctcttcttccagaagtttgggatggggatcgcgggcgggatactcggattcctgctgagccactttggctatcaggccgatgttgaacagaccgcacgttcgctcaccggtattgcgctgatgatgacgctcattcctgctctgttccaccttgcggttgggctgcttatgaaaaagtatctgattaacaacgaatattatcgtgatattcagctcgccctggcgcagaaacaggcataaggaggcgcaaatgaaggccatgaataaggtttgggttatcggcgatgcctccgttgatctggtgccggaaaaacagaacagctatctgaaatgccccggcggagcgtcggcgaacgtgggggtatgcgttgccaggctgggcggagagtgcggttttattggctgtcttggcgacgatgacgccggtcgcttcctgcgccaggtttttcaggataacggcgtggatgtcacgtttctacgcatggatccggccctgaccagcgcggtgctgatcgtcaacctgacggctgatggggagcgcagctttacctatctggtacatccgggggctgatatctacgtttcgccgcaggacctgccgccgttcaggcagtacgaatggttttacttcagttcaattggcctcaccgacagtcccgctcgcgaagcatgtctggaaggggcgagacgcatgcgagaagccggtggctacgtgttattcgacgtcaacttacgcagcaagatgtggcgcaataccgatgaaatccctgacctgatcgcccggtccgccgcactggcttctatctgcaaagtctcggcagatgagctgtgccagctcagcggggccagtcactggcaggatgcgcgttattacctgcgcgatctaggctgtgacaccacgatcatttcgctgggggccgatggcgcgctgttgattaccgccgagggggagttccattttcccgcaccacgcgtcgatgtcgtcgataccactggggcaggcgatgcttttgtcggcggcctgctgttcaccctttcccgcgcaaattgctggaaccatgccctgctggcggaggctatcagcaatgccaacgcctgcggcgccatggcggtaacggcaaagggcgcaatgaccgctttaccgtttcccgaccagctaaacacttttctttccagccattcgctggcacaagccatgaccgtgaaataaggagtcatcatgcacgttgatcaaaacaaaatactgggatgcctggtgggcgccgccgccgcggacgcgatgggagccgcgacggaagtacgcacccagcagcaaataaaagactattttggcggctgggtgacgacctttcaaaaaccgccagcggacacgtttggccgctgcaacgaagcggggatgtgcacggatgattttattcaggcgaagtacatcatggatgcgctgctgcgccatcaacgccaggtcagcgacgaggcgatgcgcgaggcttttcagcagtggctggattacccgtactacgccaactttaccggcccgacgacgcgtgcggcaatgaaggcaatattcaatgataaccgcgcctctttacagggtgagctggaaggcgagaaacagtcggtacagattattaataagggtaacgcggaggcaacgaacggcgccgccatgaagatttggccagcggcggtgctgcacccgggtgatattgacgcggcgattgactgcgcgctgcagatttgccgttttacgcataataacgtgctggcgatgtccggcgcagcggcgatggcggcggcaaccagcgaggcgttaagagcgcagaccaatgcagacagcattattgccgccggtatttacggtgcgcaaaggggctatctgctggcgcaggagcaaggggcgatgatggtggcaggtccttccgttgcccgacgcattgaactggccgtagatatcggtaaacgtcatcgccattgggaaacggcggtggtggaacttgctgatattattggctccgggctgcacgtgagtgaagcggtgccggcggcctttggcctgttcgcgtgttgtccgaattctgccgtagatgctattatctccggcgttaatatcggcaatgatactgatactgtcgccaccatggtcggggcgatttccggcgcattccatggcgtggaggcttttcccgccgattatttaacgactttggatcgtatgaatcatttcgatttggcagaactggccaggcaaatcgcagggtagcgacttcaccctgccggggacggtaaaacgtcccctgctggcgaagacgtgaggtgcgcagcttgcaggttgataaaacgagctttactccgctttataagcaactattttttatcatctgtcagcagatccaaaatggatccctgcctttaggcagccagctgccgacgcaaaaagagattgccagagcctacaacgtctcgctgattgtggttaaacaggcctggagcgaattaatcaatgcgggtattatttcctcccagcgcgggagtggttcggtggtgtgctcggtaccggaaggcgtgagctacgggcacacgtttcgcggtattacccgcgatctccaggacgccagcgtggcgattgagaaccgtattctggaaatcgcgccgcgccgcgcgcgcgacgctcaggcagacggcttgagcctgcccgcacagcatcactatctctatatttcgcgtattcgttgcctgaataaccgtccgtttaaccatgaaaagatctatctcgatcttagcttctttcccgatctgcaacttacaccgcaggcgctggagcatacgtcgctttattcgttattaaacgtcacaagcgactcggcgatagaaaaagttgaggcgattttaccttccgctgacctgtgcgaaaaattgcaaatcgccgccaataaaccgctgttatccgtcgccagacagacgtttcaggccgggaaggacagcccttttgagtattgccgctattacgtgctgtctgaatactttggtgaaattcattatcactgatctgtccacttaatcctgcgataaccccactatatctggcgtttacctgcctgactgtccgtcgtattcttgctgaaaaaatcgtcaggagacaggtatgtcgctctggttgtcccatcctctgttcctcccgtccatcatcgttggcgttactatccttctgtgggcgacttcgctactgccggagtttatgaccgcactgctattttttgctgctgtggtggcgatgggaccagggaaagttcctgcgcgggcggggatgctgtgatgtatcgcgctggcggtggtacgccaaagcgatggctcttttgtcttgctggcgaccgagcgtaatttactgatcttcaatcgcgcttctgccgaggaaattcaggatcatcagtgtgatatcttgaaccaacaggtcatcaaatgacagcttgatattgcattaacgaatgccgtttggaggccggacaaggctcttgtggcgctatccggcaaaatctggcgatggcgcgggcgttaccaggccggtggatctgcggggtggctgtcattttccagatgcggcgatttaataaacacgcctttccagggtttatcgccgttattaatgagataatgcgcctccccaggttcgcactgtaaaacatctccagtttgcaggatatgaggtgttccttccagatacaggcacacttcaccgcttagggtataaaaaacctcacaagcggtattatggcgatggttagggaatgactgccctggttgtagtatgacgacgcccatatcgcagcccggcccacggattaagtatttagggccattatcgccaaagcggtattcatgattcttctcattcgttttttgcatgcttattctcctgttacaggcctggcgctttccagagggatgtcgttaagccaccatcgaccagcgcgcgttgatcctgataaacggcctgccatttttctctggcctgctggtagacagcgaaattttcaggattaggtttatgctcccgatcccagcgcactagcttttctcccgtttccgccagcgatggccagacacccacgccaacgcctgcggcaatagcgcaccctagcgcggtagcttctttgacgacaggtacgtgaacggtgagtcccgtaacgtcggcaaggatttggctccataatttgcctttagatcctccgccggcaaaaaccagcgagtcggcctgtacgccggaaaacgcggcaatttgctgtaaattgcaggcggaaacaatggcggcattctcttccagcgcgcgaaatagggtcgctttattacacttttcaggatcgatagacagattgataaacgacggcgcggcatggtaccagcgtttaaaacgcataacgtcagagaagatgggcatcacaccgtacgcgccgggaggcacccggctggccatatcttccagcagggaatacgcatcaatacctaacctttcagcgattagtttttcctcggcgcaaaaggcgtcgcggaaccaacgcatcgttaacccagtaaaaaagctaatagactcggtttgtaccataccggggatcacatgaggattgatgcgaacgttcatgtttgggtcggtgaccggcgcgggaagattgacgacctgttgccagaaggttccgcccagcacggccgtttgcgccgggcgtacgacgcccagccccagacagcctaactgcacatcgccgccgccaacgatgaccggcgtacccgcttgcaggtcgcactgttcagccgctttctgtgaaatgtgaccgagcagcgtcccggtttcttttaccggcgagagaatgtcagaacgcaggcccgccatctgtaacagactacgtttccagttgcgggtcaccagatccaataaccccgtcgtgcctgcgttggagggatcgaccgccagttcgccgctgagcataaaggccatccagtcgctgatcatagtgacggttgacgcgcgatgataaatatccggacgatggtgggcaagccagagcagacgcggaatagcgctgagcgccagcgtttgcccggagcaacgataaacttcctcctcaaaggtgttatcgtgcagctcttttaattcactgacttcgtgcgccgcgcgggcgtcaacattagcgcaggcccaaattggttcgccgttactgtcataaataacaatgccttcacgcatcgagcaggccgatacggcagcgatagccgttgcagggatggcggctttctgtagtgcctgacggatacactggcaagccagttgccagtttttggcaagatcaaactccatcgaaccaggcacatccggcacggccagatgctgccattccgcttgaccgacagctatttgctttccttgtagatcaaaaattactgctctgacgctaccggtaccggcgtcaagagccatcaggtaatgtcctgattcagtatgggtacagagtcgagccatttttttaccctcggctatttttacatcgttacataaaatcctgtcagttattgtttattgaattgaggtaagtgttattttatttgttatttttcaataagttgaattattttccctgcggttttctgatcggtaaccagcgcattgatatagttaccgcgcatagcggcaataatagcttctgctttttgttcgccgccggcgacgccaatcacggttgggatcgtggaaagtgaatttaacttcaggccaattaattcgttatggattttgatgtctggaataatttcgccatgagcatcaaaaaaatagcccagaatatcgcctactgcgcctttgcggccaatcatgagttgttcaccctgagtgatataaccggattttaagatactggcttgatctttctggttaattgccccaatccccacgatggcggcatcggcagcttgcgctgtgagcatcacatcccgcacgctattttcattgcgcagcgtgcaggcaatttcctgcgatgatgcgcgcagcggcgcgggcataatacttacgctacaagcggcatcaagctggcctattccggtcatatacggccccacgccgccggataacgtgaccagtcggatttgttgcgccgagataaatccgctgaggcgttttaatgtggtcatcgtggcttcgccaaagccgacggccagcagttgctgtggccgcagagactccatcaacatatgggcggcgccgattcctaagcgcagaccaatatcggcatcgggtaatgccggcagcacgcggatattctgcaatgcgaagtggttgcgcaaggcattttcatactcaagacacccttcaaagcgggagttgatttgtacgcgaataataccggactgatgccctttctccagcagacgagaaacctttagccgggttagccccagacgctcgctgatttcactctgcgtcaatccatcgtgatagtagaaccaggcaatacgcgccacctgctcttcttcgcacattccataatcagataccaacgtattatcgctcattgtcataacctggcttttactttgaacatttctaaatcattaacacaattgttcagttatcactccgaaataaccgtgattaacgccacaaaaacgcgccaaatctgaacatttatcatctaaaaattcatttattcataaaacgtgatctggatgagagttttttaaccaaataactactaccgttttgaacaatttctttttcaaaaaacatttgttcagtcccgtcagtcaacattgagggagcggaggcaacatgcaaatcagtcacaatactgcatcccctctgatttgtgtgcagaacatttataaaagttattccggcgtcgaagtactaaagggaattgactttactctgcatgcgggagaggtgcacgcattgcttggcggcaatggtgcgggtaaatcaacattaatgaagattattgccggtatagtcccgccagatggagggactatcgatattgctggtgtgcgttgcagtcatttaacgcctctgaaggcgcaccagtatggcatttacctggttccccaggagcctctgttatttccgagtttatctgtgcgggaaaatatcttgtttggcttgcagggacgtcaggcctccacggaaaaaatgcagcagctattaaaggcgatgggatgccaactcgatccggcgagcgctgcgggtacgcttgatgttgcagaccgccagatcgttgaaattatgcgcggcttgatgcgcgactcgcgaatcttaattcttgatgagcccacggcgtcgttaacgccagccgaaactgaccggttatttacgcgtctgcaagagttgctgaaaaagggtgtcggaattgtatttatttctcataagctaccagaaattagacagttagctcactgcgttagcgtgatgcgtgacggtaaaatcgcattattcggaaaaacgcatgacctttctaccgacgagattattcaagctatcaccccggcaacgcagggcgtcagtctttccgcgaatcaaaagttgtggctggaattgcctggcagccgcccgcagaacgaacgtggtgcgacggtattagcgctggagtcactgacgggcgaaggttttatgaatatcaaccttgaggtgcgggcaggcgaaatccttggtctggccgggttggtcggcgcgggacgcacagaactggctgaaacgctgtacggtattagaccggtcaatgcggggcggatgctgttcaatggcgaagaaattaacgccctgacaacccaacagcggttgcagctcggcctggtctatttgccggaagatcggcagtcatccgggctgtatcttgacgcttccctggcatggaatgtctgttcgctgacccacaaccaaaaaggattttggataaagccccagcgggataacgccacccttgaacgttaccaccgcgcgttaaatatcaaactcaataatgccgaacaggcggcgcgtactttatccggcggtaaccagcaaaaagtattgattgccaaatgcctggaagcctctccgcaattactgattgtcgatgaaccgacccgcggtgtcgatgtctccgcccgcagcgatatttatcagctgttgcgcagtatcgcgcaacaaaatgtcgcggtgctgtttatttcctccgatctggaagagatagagcagatggccgatcgcgtatatgtcatgcaccagggggaactgggggggcctgcgttatgcggcgaggaaattaacgttgataccatcatgcacgttgcgtttggcgaacatggtgcgtcggaggcaacatgttgaaattcatccaaaataaccgggaagcgacggcactgctggcaatagtctgtttattcgtgtttcctggcgcgctggatagccagtatttgagcgtgcaaacgctgacaatggttttcagtagcgcgcaaattttgatgctgttggcgattggcgcgacgatggtaatgctcacccgcaatattgatgtatcggtgggctcgacgacaggcatgtgcgcggtattgctgggagtgatgttaaacgccggctatagcctgccggtcgcctgcctggccacactaatattaggaattgtcgccggattttttaatggcgtactggttgcctggttgaagatacccgccattgtcgccacgctgggaacgctgggcttgtatcgtgggatcatgctgctatggacaggggggaaatggattgaaggattacccgcaggcttaaagcaactctctgctccggtgtttctgggaatttccgcaatcggctggtttaccctggtgttagcgctgcttatggcctggctcctggcgaaaaccgcctttggccgcaatttttacgccaccggcgataacctgcagggcgcccggcaattgggtgtccgtaccgagatggtacgcatcatggcattttcacttaatggcggtatggcggcattggctggaatcgtgtttgcctcgcagattggcttcattcccaatcaaaccggcacggggctggaaatgaaagccatcgcggcctgcgtattggggggaattagcctgttaggcgggtcaggcacggtcatcggcgctattctcggcgcttattttcttacgcaaatcgatagtgtgttagtgctgctgcgcatccccgcctggtggaacgattttattgctggcctggtattgttgggcgtactggtattcgatgggcggctgcgttgcgcattacaacgcaatctgcgccgccagaaatatgcccgttttatatcaccacccactccactacagacggaagcaaaaacgcacgcacaacagaataaaaacaaagaggtggcatgatgaatccatggcgacgctatagctgggaaattgcgctggcagccttattgatctttgaaattctggctttcggtgtgattaatccacgtttattagatattaatgtcttactttttagcactagcgattttatttgtatcggtattgtcgctttgccgctaacaatggttattgtcagcggtggtatggatatttcatttggttctacaatcgggctatgcgcgattaccctgggtgtgctgtttcagctcggtatgccgctacctttagcgattattattaccctactactcggcgcaatatgtgggctgataaatgccggacttattatttataccggcgtaaacccgttggtgattaccctgggaaccatgtatttatttggtggtagcgcattattgttatctggtatggctggcgccacaggttatgaaggtattggtggatttcccacagcgttcactgattttgccaatatttcatttcttggtattcccatgccgcttattttttttcttgtgtgctgtctgtttttctggctgctcatgcatcgcacgcatatgggacgcaacgttttcctgattggccagagcgcccgtgtcgcgcagtacagcgcgatcccggtgaatcgcacgttgtataccgtgtatgccatgaccggatgcgcctccgctatcgccgccgtattactggtttcttactttggctccgcacgttcggatctgggcgcctctttcctgatgccggccattacggcggttgtgctgggaggcgccaatatttatggcggctccgggtcgattatggggtccgcgttggcggcgctgctggtgggatttttacagcaggggctacagatggccggagtgccgaatcaaatttccagcgcattgtccggtgcgcttctcattgttgttgtcgttggtcgttccgtcagtttgcatcgtcaccaaatccttgaatggtactcacgccgtcgcaatgcgcatcaggcatgatttccttttgaaatttatggagaaaaaaatggcaagacacagcattaaaatgatcgccttactcactgcgtttggtctgacatctgcggtaatgaccgtacaggcggcagagcggattgcttttattcccaaactggttggcgtgggcttttttaccagcggcggcaatggcgcgcaggaagcgggaaaagcgctgggcattgacgtaacttacgatggccctacagagcccagcgtctcaggccaggttcaactggtgaataactttgtcaatcaggggtatgacgccattatcgtttctgccgtttcgcctgatggcctgtgcccggcgttgaagcgggcaatgcaaagaggcgtgaaaatattaacctgggattccgataccaagccggagtgccgttcttactatatcaatcaagggacgccaaaacagctcggcagcatgctggtagagatggtcgctcatcaggtggacaaagagaaagcgaaagtcgctttcttctattccagcccaacggtgaccgaccagaaccagtgggtaaaagaagctaaagccaaaattagccaggaacatccggggtgggagatagtcactacccagtttggctataacgatgccacgaaatcgctccagacggcggaaggtatcatcaaagcgtatcccgatctggatgccatcatcgcgcctgacgctaacgctttacctgctgcggcacaggcggcggagaaccttaaacgtaataatctcgcgattgttggttttagtacgccgaatgtgatgcgcccttatgttcagcgcggcactgttaaagagtttggcctgtgggatgtcgtccaacagggaaaaatttccgtatatgtcgccaacgcgttgctgaaaaatatgccaatgaatgtcggtgactcactggatattcccggcatcggcaaagtcaccgtttcacctaatagtgagcagggatatcactatgaggcaaaaggtaacggcattgtgttattgccggagcgtgtcattttcaacaaagacaatatcgacaaatatgatttctgataactgttatgtatcgacggagtaaagaatggctgatttagatgatattaaagatggcaaagattttcacaccgataaaccacaaactaacactttgttcgcattaaaaggctgtggcgcgctggattggggaatgcagtccagactggcgaggatttttaaccccaaaaccagaaaaacggtcatgctggcctttgaccatggatatttccaggggccgacaaccggacttgagcgtattgatattaatattgcgccgctctttgaatatgctgatgtcttaatgtgtactcgcggcatattacgcagtgtggtacctccggcaatcaataaaccagtcgttttacgtgcgtccggggcgaattctattctcactgaattaagcaatgaggcggttgcggtggcgatggatgacgctgtgcggttgaatagctgtgctgctgccgcacaggtttatattggtagtgagcatgaacatcagtcgattaaaaatattattcaactgattgatgccgggttacgcgtcgggatgccaataatggcagtgaccggagtgggtaaagatatggctcgcgaccagcgttatttttcactggcaacgcgtatcgctgcggaaatgggggcgcaaattatcaaaacgtattatgtcgataaaggttttgagcgtattgcggcaggttgtccggtgccgattgtcatcgccggcggtaaaaaactgcctgaacgtgaagcattggaaatgtgctatcaggcgattgaccagggggcttctggcgtagatatggggcgtaatatattccagtcagaagatccggtagccatgattaaagcggtacatgccgtcgttcatcataacgaaacagcagagcgtgcttatgagctgtttttgagtgagaaaggttaaatgagatcgcttccccatcttttatcgatgcgaggagatggggatgactgttattttatttggaataatcaggggttaatgatgcacgttacgctggttgaaattaacgttcatgatgacaaggttgaacaatttatcgatgtttttcggcagaatcatctgggctcaattaaagagccgggtaacttgcgttttgatgttctgcaggatccgcaggtgcctacgcgattttatatttatgaagcctacgttgatgaacaggccgtcgcttttcacaagacaacgccacactataaaacttgcgtggagcagcttgaaccgttgatgaccggtccgcggacaaaaaaagtttttatgggtttgatgccttaaggagtgctcatgaacagccagtttgccggattaacgcgcgaagcatgtgtggcattgttagcgtcatatccgcttagtgtgggtattctggcagggcagtggattgcgttgcatcgctatctgcaacagttggaagcgttaaaccagccgctgttgcatttggatttgatggatggtcaattttgcccgcagtttaccgttgggccatgggcagttgggcaactgccgcaaacttttatcaaagatgttcatttgatggtagcggaccaatggacggcggcgcaagcctgcgtgaaggcgggcgcacactgcatcacgcttcaggcagaaggcgatattcatctgcatcatacgctaagctggcttggtcagcagaccgtgcccgttattggcggtgaaatgccggtgatccgggggattagtttatgcccggcaacgcctctggatgtcattatccccattctgagcgacgttgaggttattcaactactggcagtgaaccctggatacggcagtaaaatgcgctccagtgatttgcacgagcgcgtggcgcagcttctctgtctacttggtgataaacgcgaaggtaaaattatcgttattgatgggtcgttaacgcaggatcagttgccttcgctgattgcacagggcatcaatcgtgttgtttctggtagtgcgttatttcgtgatgatcggctggttgagaatacgcggagctggagggcgatgtttaaggttgccggggatactactttcttaccctccacagcataaatgccggatggcggctttaccttatcaggcctacataagcactcggctggtaggcctgataagcgcagcgccatcagacatagattggcaattaagcctgtttagcagcttctgctgctttcacgatcacggcgaaggcgtcagctttcagagaagcgccgcctaccagcgcgccgtcgatgtccggctgcgcgaacagttcggctgcgttggaggcattaacagaaccgccgtactggataatgacctgttcagcgattttcgcgtcagctttagcaatgtggtcacggatgaatttgtgcactgcctgcgcctgcgcaggcgttgcagatttaccggtaccgatcgcccatacgggttcgtaagcgataaccgcgccttcaaaggctgccgcgccctgcgttttcagtaccgcgtcgatctggcgtgcgcatacttcttctgttttgcccgcttcgttttccgcttcggtttcaccgatgcacagtaccggcgtcagaccttgttctttcagtacggcgaattttttggcgatcagttcgtcagattctttgtgataagtacgacgctcggagtggccgataataatgtactgcgcgccgatatctttcagcatttcagccgaagtttcaccggtgaatgcgccagacagattcagatcaacgttctgcgcgcccagcatgatgtggctgccggcagcagcgcgtttcgccagatcgatatacatttccggcggagcgattgccacgtcgcagcctgctacgcccgccagttctttacgcaggttagccaccagttcgtttaccatgtggcggctgccgttcagtttccagttacccatcactaaaggatgtcgcatttcatttctccacgcttagtcagcgaattaaggaagatggccgctcgtcagagcagcatggtctgtgaaacagtatagagattcatccccggaaaggctttgctttttgtcatcaattcgccccttccagattttcagataacgccagcttaatcggttcaaccgcgaaggtcagccccttttcgccgttatctgcgacaacataacgtaccgcgccttctgtctcggcgtaatagtgtttacctttaccggcgataagcatcttttgcagttttttctggctttgctcttttgtcagcaacggggcgacagtacgaataatggcggccatatattccagcgctttcgctttcgccgctttctgttccggcccctgaatgggcagccaggtaatctgcatacttttcactttgagcgtaccgcgctccaacgccgtggaggcatacagattttcgttaatcttactggcggcgcgggtcagattcgccttatcgcggctattctcaatggcgcgaaattcattgagcggcagatcgggattctggcggttaaagttctcacgaaactggctaatagaaagatcaaaggttggcgagcccgccagcagatagggcgctgtcgtggtcgatgaagagagctgcgcgtgcgccgttatgctggcggtgagagcagaaaacaacagtaaaaacagagtacatcctggcttcatcaatcttacctttcgttaggactgctcacgattaaaacgataactgtcgggcttgtcaaaagggtaaactgtagcggaaggcaaaatataaggaacttacatgaccatacagcaatggttattctcatttaaagggcgtatcggacgccgtgatttctggatttggatcggcctctggtttgccgggatgctggcgctattttcgctggcggggaaaaatctgcttgatatccaaacggcggcattttgcctggtgtgcctgctgtggccgaccgccgccgtcatggtcaaacgtctgcatgaccggggacgctccggcgcgtgggcgttgctgatgattctggcgtggatgctgctggccggaaactgggcgatgctgccggggatgtggcagtgggtcgtcgggcgatttattccgacgctgatcctggtgatgatgcttatcgatctgggcgcgtttgtcggtgttcagggggaaaataagtttgggaaagcgacacaggacgtgaagtttaaagcagagctgtagcgggcggtaaaccataatttgcccggtggcgctgacgcttgccgggcctacagattggtgatgatttgcaggccggataagccccagccgccattcggtaaaacatcaccagtaatgttcagccgtcatatgccccggtcggcggcgcagatgtttagtcatctgtcgggtctctttcagcagttgctgcgtatcgcgcaccatctgcgggttcccgcacagcatgacgtggctggtctctttatccatcggtaatccaacggctttttccagctcgccgttttcaatgagcgctggcacgcgtccggtgagcgagcctggcacgctctcccggctgaccaccgtttggatgcgcagcttgccttcataacgctgttgcagttccagcattagcggcagatagcttaaatcggcggcgaagcgtgcggcgtggaccaagaccagatttttaaagcgcgcgacatcctgcccatattgcagaatagacaaatacgggccaatagcggttccggtcgccagcatccatagcgtctcgcagtcaggcacttcatccagtacaaagaaacccgacgcgtcgctgaccacttgcacctcatcgccaggttttagcgccgccagccgcgggctgagctttccttgcggcaccgtcaccagataaaactctaaattcggattgtcaggcgcattgacataggaatacgcgcgctgaacgcgctcgccatcgatctccagtccgagtttggtaaattggcctgcagtaaaaggattaatgggggcgtgaacggtcaggctgaacagtgcgtcagtccagttttgcaccttagtgactttacctgttacccaatcggccatggttttctcctgttctgaatcgctaaccttatcttcgttcgtcaggagaaagatttccagccccgcgaggctggaaggctctaactaacaaatgcgctagaggatatgcgcctgtacatccggatctttacgatcaagatagtggatagactgaatgcggcggatggtgcgtgatttgccgcggatcagcagcgtttccgtcgtggcaatatggcctttccggctaattccttccagcagatcgcctttcgtgatgccggtcgcggagaaaataacgttatcgctacgcgccatgtcgcccaggcataacgccttgcccgcttcaatgcccattgctttgcagcgcgccagttcctgttcgccaatgcggcggttttcttcgctgtcgcctttcacatcatggcgcgccagcagacgaccctgcatatcgccgtccagcgcgcggatcaccgctgcggataccacgccttctggtgcgccgccaatcccgtacagcacgtcgacttcgctatctggcatacaggtcagaattgaggccgcgacgtcgccgtcaggaatggcaaacacgcgtacgcccagtttggccatctctgcgatgacctcgtcatgacgcggttttgccagaatggtcacggtcagatcgccaagcggtttacccagcgcatccgcgatgttgcgtaggttatccgccagcggcagattgagatcgatcgcccctttggcgcccggaccgacaatcagtttttccatatacatatcgggcgcattcaggaagcagcctttatcgccgaccgccagcaccgccagcgcgttcgcctgacccatcgccgtcatgcgcgtgccctcaatcggatcgacggcgatatctaccgcatcgccgtggccggtaccgactttctcgccgatatagagcatcggggcttcgtcgatttcgccttcgccaatcacgatggtgccgtcaatgttgacctggttgagcatgatacgcatggcgttgaccgccgcgccgtccgcggtatttttatcgccgcgtcccagccatttgtagccagccagcgccgccgcttcggtcacacgggaaaattcgatggcaagttctcgtctcataacaaactcgtagcaaaaaggagtggcgcgcagtgtagcacaggggaaggagggaataattgatgtgtgtgcggagttgcctccgcacaaagattttgccggatggcgaccttacttgtcgtgctcttcccacgccattgcgcgtttaaccgctttcttccagccgctgtaacggtagttacgctcggtggtttcaatgccggggcggaattctcgctcaatgacggctttttcctgcagctcgtccaggttctgccagtaaccgacggccaggccagccagataggcggcgcccagcgcggtcacttcgcgcacttccgggcgttccacccgcgtgccgagaatatctgactggaactgcatcaggaagttgttggccactgcgccgccgtccacacgcagagcgtgcaggcggataccggagtcggcctgcatcgcttccagtacgtcgcgggtctggtaagcgatggattcgagcgtcgcgcggataatgtgattagagttcacgccgcgggtcaggccaaaaatggcgccgcgggcatacgggtcccagtacggcgcgcccagaccggtgaaggccggaaccacgtagacaccgttggtatctttcactttcgtggcgaaatattcggagtcgaacgcgtcgctgatgagcttcatttcatcacgcagccattgaatggacgctcccgccataaacaccgcgccttccagcgcatagttgacttcgccgcttgggccgcaggcgatggtggtcagcaggccgttttccgattttaccgctttctcgccggtgttcatcagcataaagcagccggtgccgtaggtattctttgccattccttcctttacgcacagttggccgaatagcgcggcctgctgatccccggcaatcccggcgataggaatacgtgtaccgcctttaccgccaatattggtctggccgtagacttcggaggacttacgtacctggggcagcatcgcgcgtgggatatccagcacgtccagcatcttatcgtcccagtccaaatcatggatgttgaacagcatggttcgtgaggcgttggtgtaatccgtaacgtggacgcggccctgcgtcatcttccagataagccaggtatccaccgtaccgaacagcagctcgccacgcttcgcgcgttcgcgcgaaccttccacatggtcaaggatccatttcactttagtgccagagaagtacgggtcgacgaccagaccggtattgtcgcggatgtaatcttccaggccgtcgcgtttaagctgttcgcaaatatcggcggtacgacggcactgccagacaatagcgttgtatatcggtttgccggtttcacgttcccagacgatcgcggtttcacgttggttggtgataccgatagcggcaatctgatcggaactgatatcggccttagccagcacttctaccagcgttgagctttgggacgcccaaatttccatcgggtcgtgttctacccagcctggcttaggataaatttgctcaaattcacgctgtgatacgctgacgatattcgcgtcatgatccataacgaccgcgcgggagctggtggtaccctggtcgagcgcaacgatatattttttttcagtcataattttgtcccgtaatcagattacagcgaagcattttgttgtgtggtcgcggtggagtccttctcttccacgacgcaggtatcgcacggcaaatgacggccaataaatttgcgataagcaaacgcgcccagaatggcgccgacgatggggccaaacagtggcaccaggaagtaaggaatgtctctaccgccggtaaacgcaatttcaccccagccggcaagcccggcgaacattttggggccaaagtcacgcgccggattcatcgcaaacccggtcaacggccccatagaggcaccgataacggcgatcagtaaaccaatgagcagtggcgcaagcggaccgcgaggtacgccgtttccgtcgtcggtcagcgccagaatcagccccatcagaatagcggtaatcaccatttcaaccgcgaaggcctgcacaaaattgatatgaggattcgggtaagttgagaaaatgcctgcgagatcgagactttcaacgctgccacggacgatatggtgggtttgttcgaagtccacaaaaagattgtaataaagcccgtaaactaacgccgctgcgcaaaaggcgccggcaacttgagaaataataaaaggaacaactttacgtttgtcgaaacaggcaaatagccagagtgcgatggtcactgccgggttcaggtgtgcgccagaaacacctgccgtcaggtaaatagccatcgctactcccagaccccagatgacgctgatttcccactgtccaaaagtagctccggcaactttaagcgcagcgacacaacccacaccgaaaaaaatcaacaacccggtaccgaggaattcagcaatgcactggccttttaaggttgatgtttgactcataatcggatcctgaagagtatgtaatgattattggtatgcgaggaggtcatggacatccacgatgccctgtaggcacactgttaatttatcgttaacgagcaaaaacgagaaatatcgaaatcaaaatgtgtgtactgcgtcaataaaatgagcgttatcgcgccatgaggcgcattttgagacagcagaagagagtgaattgaatcatttcattaaccaatatgttaacacttttaagttattgaatgaatgttaccaggagatggatgaaaattgctgcaaaccgcgatctacgcggtatgtcgctggacagcgagagcggggcttcatacaatcgacactatatattgtgcgcgtttacgtgaagcgtcgccttgcaattcaggagaggtaagatcatgtctttagaagtgtttgagaaactggaagcaaaagtacagcaggcgattgacaccatcaccctgttacagatggaaattgaagagctgaaagaaaagaacaacagcctgacgcaggaagtgcagtctgcacagcatcagcgtgaagaactcgagcgtgaaaataattctctgaaggaacagcagagcggctggcaggaacgtttgcaggcgctgcttggtcgtatggaagaagtctaatcctcgtcatatttcacgttatggcggcgttggctgcgtgcgttcaccccagtcacatagtggcctatgctcctggggattcacttacttgccgccttgccctgacgcgaaatctatagaggatttagaatgcggataccggtgggccggataaggcgtaagctgccatccggcaatcagcgacaacgcataaaaaaggcgccttacggcgccttttttgatcactcgatatcaagcgggtcttcggaaaggataatcccggtgttgtcggcatagagatgatcgccggagaagaacgtcacgccgccgaaattgacgcgcacatcgctttccccaatgccttcacctgcggcgccaaccggaatggcggcgatcgcctgaatgccgatatccagctcttccagatcgtccacctgacgcaccgcgccatagataaccagcccttcccattcattttgcgtggccagacgcgccagctccgcatcgactaatgcacgacggacagaaccgccgccatcgaccagcagaacccgaccacggccattttgttcgagcagatcgtacagcaacccgttgtcctcgaaacattttaccgtgatgatttgtccgccaaacgacgaccgccctccaaaattagagaacagcggttccacgacgttgacatcttcctgatagatgtcacaaagctcggaagtatcgtatttcataggcttaacgttcagttgctgcgagaatttttagtatatcgcgctaagtatactgttggcaaaatcatcaattgttaattgatatttgtcagttaaacggcccactgacttaagagtatcccaatcacaaataacaggttggttaacaacgcgcctttaacggtacgttcaagcatcgggcgcattgccgcaggctccctttcgcgcattacgtagcgcgcttgtttaatgagcaagggcgcggccagaataaacaaccatccccacggactgtgtagcgagagcagattaaacagcgccagacagagcagcgcgcctagcaacaggcaggcgtgataacgacgcgcgttgacatcgcccagtcgtactacaagggtgtttttgccgttctctctgtcgctattaatatcgcgcaggttattaatattcagcactgccgtcgccagtaaaccgcaggcggtggccgggagaatcagcgccggaatcagcgtatgcgcctggagataccagctccccatgacacttagccagccaaagaataccagaacagagatatcacccagcccgatatagccgtagggccgattacccacggtgtaggtgatggcggcgataatcgacagcccgcccaaaatcaggaagccgataaaatcggttaacgtatggcacgcgaccgccaccagcgccagtccggagatacagatcagcacgacggtaatgattaacgcccgcttcatctcctgccgggtgatgacgcctttttgcatcccccgcagcggcccgatgcgatccggtttatcgctgcctttgacagcgtcgccataatcgttggcgaggttggataaaatttgcagcagcccggcggtgataagggccagcagcgcgaccagaggatcgaaatagccttgccaccatgccagggccgtaccgacgataatcgctgcgaaggcgaggggtaaggttttgggtcgtaagctttccagccaggcctgggtgcggctaatttgttgttgttcagtcatatttagcgccaataaaaatggggcttttcagccccatcaacagtgatgaaaatgcattggacgcgattataagataaaacggcttagatcttcatctgcgaccagcgcatccagatgtttgctcacatattccgcatcaattgtgatgttttggccgtgcagatcgctggcgttataggaaatttcttccatcagacgctccagtacggtatgcagacggcgcgcgccgatgttttcggtggtttcgttaacctgccaggcggcttcggcaatacgtttaataccggaatcggtgaactcgatattgacgccttcagttgccatcagcgctttatactgcacggtgacggacgcgtttggctcggtcaaaatgcgttcgaaatcgctggtggtcagcgcctgaagttcaacgcgaatcggcagacggccctgcagttccgggatcagatcagacggcttcgccacctggaacgcgccagaggcgataaacagaatatgatccgttttgaccatcccgtgtttggtcgaaaccgtgcagccttctaccagcggcagtaagtcgcgctgtacgccttcgcgtgaaacatccgggccggaggtttcgccacgcttacaaattttgtcaatttcatcgataaacacgatgccgtgctgttcaaccgcgtcgatagcgtcctgtttcagctcttccgggttgaccagcttagcagcctcttcttcaaccaacagtttcatcgcgtctttaattttcagcttacgcggtttctgtttctgaccgcccaggttctggaacatagactgcaactggctggtcatctcttccatgcccggaggcgccataatctctacgcccatcggcgcggcggcgaggttaatctcgatctctttatcgtcgagctggccttcgcgcagttttttgcggaacgtttggcgggcggcagaaggctcctgctgctgttcggcctggccccagttattttttgcgggtgggatcagtacgtcgagaatacgttcttccgccaactcttccgcacgatagcggtttttctcgatagcctgtacgcgaaccattttcacagcggcatcggtcagatcgcggatgatagagtccacttctttcccgacgtagcccacttcggtgaatttggtggcttcgactttaatgaacggtgcgttggcgagttttgccagacgacgggcgatttcggttttaccgacgccggtcgggccaatcatcagaatatttttcggcgttacttcgtggcgcagctcttcatcaagctgcatacgacgccagcggttacgcaatgcaatcgccacggaacgctttgcgttatcctggccgataatgtgtttgttcagttcgctgacaatttcgcgtggggtcatttcagacatgaggggtccttacgctttggcggtcaattcttcaatggtgtggaaatggttggtgtaaatgcagatatcgcctgcaatatccaacgccttttcagcaatttcgcgcgcgccgagctcggtattttccaacagagcgcgagcggcagcctgggcataaggaccgccggagccgatagcaattaaatcgttttcaggttgcacgacatcgccgttacccgtgatgatgagcgaagcggtttcatccgcgacggccagcaacgcttccagtttgcgtagcatgcggtcggtacgccagtctttcgccagttcaacggcggctttgaccaggtgcccctgatgcatttccagtttacgttcaaacagctcgaacagcgtgaatgcatccgcagtaccgcccgcaaagcccgcaatgaccttgtcgttgtagaggcggcggactttcttcacgttgcctttcattactgtgttacccagtgtggcctgaccatcaccggcgattaccacgtggccgttacggcgtacgcttactattgttgtcacgagcagaccccttggttactaatgctgaattgcggccccgtacggcgtacggggcataatgcaagtatagatgggggagattttgagggtttcaacccccggtggcgagtcgaatgcagtttgtatggcccgccatcttcagacggttaatggtgctgtcggcattttctttacctttcaccggcccgataaccacgcgattccagccgttattggtggtaattttggagtcaaagccttcaaacgccagctgagcgcggacgctttctgcctgctcggcgcctttgaatgaaccacattgcaccatccagcgacgttcatcttttttctctgctgtcgccttcggcgcttcaggcgcgcgcgtaatgggcgcggcttttggcgctgccgcgctggtatgcgccggcgtttgcagcaaatcctgataaggttgctgcgaggccgtctgcttcggcggctgactttggcgcgcgggttgcgccggggcggactgtaccgtgcgcgtttgcgactgttcgtttacccgcggctgcgtacgtggttgctgaacaggctgcgtttgagcccactgctgctgctgcgcctgacgctggcgctgtagcgtttgctggcgttgttctggcgtctgctcgttccacggcacttcgttaagttgcgttggctgctgacgcatatccgcctgcatctgctccagaagttgacgctgctcgctggtgagctgattcgggttcatgacttcaccgccggcggacggttccgttggcgtacgcacgcctggctggcgactttccagctctttgatgtaacgccagcgctcttccggttttggcggaagcccattgccggtgactttctggttttgtagcgtttcggactcttctttcttatggtgagtaatgaagtacagaccgccgataaaggtcacaaggacggctgccgcaatcgcgaccattgccggcgagacggcaggcatgttgctttgcttcttccgtgagttccgtgaggtgctctttttgcgccgcgaaggagccggttggccgcgacgtacataatctcgttgtgccactatcgtttcgctgtatttattcgttcgtcagcccgtcatgttactgaagcggcgggcctttgaccagacaggtgagtcttaaagctatttactttagggtaaagcgcgcgtagaaccgcgaataatcagctcgcaatccattaaacgcgagccgctgctcacattttgcccctgcatctgatcgagcaacagcagcatcgcttcgcgaccaatgtcaaaacgcggctgcgccacggttgtcaacggagggtcgcaaaactcggccagcgcgatattgtcaaagccgataatcgacagatcgtcaggtactttcagaccctggcgcttggcccaggagagggcgcccagcgccattacgtcgctatgacaaaagacggcggtaggcggcaacggttgctcaagcaactgctttaatgcgtttgccccggcttcaaaggtaaagtcgccacgggcgatgtaatgcggatcgaccacaatgccactgcgtcttaatgcctgtacgtaaccttgtaagcgatagtgacagagcggcatatcttccggccccgcaatacaaccaatccgcttgtggcccaaatccaacaggtaattcatggcgttgaacgcggcggtcaggttatcgatatgtaccgtcggcaattcaagctccggcgcgaactcattcgacatcaccatcggaggcaaattgcgctgctcctcaacgctggcgtcaaagggcagtcgggaactgagaagtaccatgccgtcgatctgtttggtgatgatgagattaagaaaggttttttctttctggttttgatgggcgcaatcgccaatcagcaccagatacccctgttctgccgcggtcacttcgataccgcggataatttcactgaagaagggatcgcaaatatccgggacaatcaccaaaatcgtacgggattcattgcgttttacatttcgccccatcgactgcgggaaataacccacttcaagcgcggcctgttcaacccggctacgggtcgactgggagactttatcggggttcattaacgcgcgggatacggttgccgtagagactttcgccttcaacgcaacatccttcatcgtagcggcagtaacctgcttgttcgatttcactctttctcctcgcctgggaactgctggcgcagatctatccctggtaacactcatcgaaaacatttttatcagatagtgcgtggaagcggttacagaattttcataaaaagtgtgatggatctttaattttacgatccgcctcgcatcgtgaggactatccttcaatcggatcgacgtccagaacccatttaactttccgcgcttccgggagcgtattgatcaacgccagcgtgccgctgatgatgtgttgcaggcgaatccgtgaaggatgctgaagtaaaatttgccagcgatagcggccgccgcgttttggcgcgagggccggaaccggacctaagatccacagcttatcgtctgatagcgggctggcctgaatcagattacgcaactgttggagaaagacgggcgcctgctgattgttatgatcctctgcgcgaataatgacgtggctggtccacggcggaagctggagcgtttgccgttccgccagcgcctgctccgcaaacgcatcatagcctttatacagtaacgtttgcagcaggggatgctcaggatggtgcgtttggagcaccacttcgccctgtttgcccgcgcgcccggcgcggccggaaacctgagtgtagagctgggcgaagcgttccgccgaacgaaaatctgcggaaaaaagcgcgccatcgacatccagcaacgccaccagtgtgacatccggaaagtgatggcctttcgccagcatttgtgtgcctatcaggatgcgtgctccgccgcggtgaacttccgccagatgctgctccagcgcgcctttacgactggtggtatcacggtcgattcgtgagatcggcacgccggggaagaagggcgccagcacctgctccagctgttccgtccctaacccaaccggtaacatatgtgtggagccgcaggaggggcactgacgcggtaccggacgctggctgtcgcagtgatgacagcgtaaatgatgctgcgcctggtgcagcgtgtagtagtgatcgcaacgcgggcactctgcaatccagccgcagtcgtggcaaagcagcgcgggcgcgaatccccggcggttaagaaataaaattacctgattgtcggcctggagatgttggcgcatacgggcgataagggcgggcgccagtcccgcctgaagacgctggccttttaaatccagcacatgctgcagggctgggcgggcgttgcctgcgcgccgcgtcagacgcagcatccggtattttttctgccgcacgttgcatagcgtttccagggctggggtggcggagccgagaataatcgggatctgctcgctatgggcgcgatacactgccaaatcgcgggcatggtagcgccacccttcctgctgtttataagagctgtcgtgctcttcgtcgatgacaatcacgccaagatttttaaacggcgtaaacagcgaggagcgcgtgccgatgacaatcgccgcttcgccgtttttcgctttcagccatgccgaaagacgctcgctgtcgtttagcccggaatgcagcacttccaccggcgcgttaaaacgttcgcgaaaacgggcgatcgtttgcggcgtcaggccgatttccggcaccatcaccagcgcctgtttgccctgggcgaggacgttttccagcacgctcagatacacttcggtcttgccggaaccggttacgcctgccagcaaccaggcggagaaaccgtccgacgcgctgtgaattgcgccgactgctgtcgcctgttcggtattcagccgcaggcgctctcctgcgatggcataatgctcccgccagtcggtaaacgcgggcgcttcactggcaagctcacaaagccccttacgccgcagcgtttgcagcgtggcgtcagtaaaatcaagctcggctacctgatagcgccagatctttccttgccgtagcgccgccagcgcctgttgttgtttggcggagcgtttcaggctgttgatgtcgacggcttgcccctcttcggtggcgaaccaataccataggggcgcgttgctggctggttttccctgacgcagtaaaaccggcagagcgtgaaacagaacgtcgccgagggggtggtggtagtaatccgccgcccagaggagtaagcgccagatggagggagaaaagattggttcgttatccaggatgtcaatgaccgattttaattcatcgagcggcaattcgctgtggtcgctaaccgagacgacaatgcccacgcgctcttgctgcttgccgaacggcacacgcacgcggcacccggctttggcgaccccgccttccggcagcaggtaatcaaaggttcggggaagcggaacgggcaaggcaacgtgcgcgacggacatagcatcttcctgacttgaaatttcgtcgggtagtatacacattacgataagggagcgcggatcagtttgcatacggtggtcaaattctgtatgattcgccgcctttggtgcgtgttgtgagcatcaaaccctttactattaacttcgcgtggtgtctggcgttagggctggaagagcgacgcggccttacactgaggttccccatgaaaaaaggtattcacccgaattacgtagaaattactgcaacctgttcttgcggtaatgttatcaaaacccactctaccgtgggtcacgacctgaacctggacgtgtgcggcaaatgccacccgttcttcactggtaagcagcgtgttgttgataccggtggtcgtgttgagcgcttcaacaagcgcttcagcatccctggcagcaaataagttaccgccagaaaaaaagcgccgcagggcgctttttttgttttctagggataacagtatttgttcagacacattctgtgatccgtaatcgctttcattacgcttcctgccgtgagttttaacgaaggatttatagttagtcccgcgctttccagccccttcgctgtccatttattgcaggtattgagtatgccgtagcggccattcgcggcgtaaaactggctatcgccgtaaattccttgttttaacggaatcagattaccctcttcgtcacgcgcaaagctgcggcccagatagcgcatcagactgttacgctggtttgtgtgcaggagcagtgattttatctcgctaccggcgaaatagcgttctggtttaccggaaaaggcgacgatgtgcataaccgcgccggatgaccagaacatggcctggagcgtaagcgcggtggttatttcttgtgactgataaaagcccttatcgccccagccgatttcataccactgcgtctcctgagcgaaccgttttttaagctgtggcagaacggtattaacatcatgggccggcgcaataattcccgtgtgccagccatgactgacgatatagatttccgtcgggtagggctgtccgcctgtcgtaggttttacggcttgtggaaaggttgtgcagccatatagcaataaacttaaccaggcgataaagagatttttcatgacatatcaccagcaaaggcgcggtatgttgtggcgtttgtctaatgacgctgcgcttatcgggtcggtgccggattggtaattcattgatatttttgcattcctcttcgagggcaataaggcgaatgtcataactacaatacgttttaaccattcaggcggaagttagcttccgcctgttttacttttactatctcgctttattttttaaacatctgctctggatcgataatcagcgcccgataacccagcataccggcacggttactgtgtacttttagctccagcatcacatcctgagtaccgtctttgacttcatccagaacggaaacgatcggttttgtaccgctcattcccgctgtggccgagtacatgaacatcgttttggtttccgggcgatattccgtgacggaagtaatggcgctgtaccagtcaaaaccgcgctctttaccatattcccacatttgggaaaccgtcatatttttttcgtcaatctgatattccacgccgcgggaatatttcattgacggcatggccggttgttccatgccgcgcgcatcgccgttatcaaaggcggtcacgacggttttacctccggtgcttttggatggcactaaccaaccggtatgttgtgtccatgtccagtcaaatccaccgtcgcagtggtgagcttcgcaggttagcggtttaccgttgctgtctacgggtttcagcacttttttcgccagttcgcctttccagccggatggatcggaaagtatccatttcacttttttatcgcggccaattttgatgatggcagactggtggcgcgagctaatgataatgctgtcgtcgcgaggatcgtagctgacggagttaacatgcgcccagttgcggcccgggccggagcccgcgatatcgccgaagggttgttttgcaagctgctctttggtcatgacctgaccggaatgttcggcatcgacgctcaaacataccgctccctgatccatcgccagaataacgtcgtcacgataggggtcgaggatttttggcagatcccagtaatcgacggtatcgccgttctggtcaacttcaagaatatgatcacgcacagtattgatggtgtatttaccatttaatggataattttcttttgcgacacgcagcaggtaggtgcctttcggcgtttcggtaatggcgtgcgaaaaatcaataaatccttttggcagtcgtttatcagaaataacgcggcctaagaaatcatatttaaagtaacgttgaccctggccaaaaataagattgccatcgttaacctgatggaagctcatcatggaaccaaaacgcgttatatcatcctggttacggaatttatcaatattcatatagccacgaacatcgccattcgtatcgctaatccagttgataccggtataatcccagttcgccgcgccgcctgcgacatgcataatgtggccggctcttggcatccccgttatatggttaaaaagatataagcgatttttaagcgagctatcgactttaaccggttctaccgtaggaagaacggcagtttgcccggtagtagagggtaatgataccggtgcggcgtaaatggaccacgtataagtttgttttttaccttcttcagtccagtcaactttaaccttattgacataatctggatacaagccaaatacaggtatgccgtcatgggtatttatagcctgcgggccgacatcataactgatcgggatacctttttcccctttccctaaaacggtaaccttcacgtcctgtacattatgattggctttattaatgattgctgttaatgggaaaacgccgccgtagggagcgacatcgaccatacctaatggctcctcatggactggaatgacatctgctgatgcgaccattggcctgtttgggtctaaaacgcctgaggccaaaacgctgccgctcaaacacaggcagcataatacaggtaagactttccttgtaaataacatatttatttccccattcgatattatcgataaaatgaatatatattaaccttcttatttatcggagatgaaaaaacatttaaaaaagtaaaacaatccgcggaggggaataatgatgttggtcacaaatatgaggtgtccatggtctttttaacaatactcatcgttatactatttgttcagtaaatatatggcgctgtattattattcatatgcgctttgctacgtgaaacattaaataaatattagaagtttaaatataataaaattatatcggttataacatgccgggaattttttccaggaaaataacgaagagaaacttatcatgtctgacaaatttatccaccgagggctattcgggaagatgaacatttagaacaatgtcggagatagccgtgtacaaggggaatcgttaaaaaagcgcggccagaggcgttctgaccgcatgctttgctatcagtattcccacgtttccggatcaatccccatctcacgcatgatctcttttgccgcttccgggatttcatcgctgcgctcttttcgcagatcggcatcatccggcaagggttgcccggtaaaggcgtgcagaaatgcttcacacaacagctcgctgttggtggcgtggcgcaggttgttcacctgacgacgcgtacgttcatcggtgaggatttttaacaccttcagaggaatggaaaccgtaatttttttgacttgctcactcttcttaccgtgctcagcgtatgggctgatatattcgccgctccattcagccatgagatacttaatcctcttcgtcattaatattgaggtctgaacctgagcccggaccataatcgcgcgtagtttaccgtagtggcgcggccctgacacgaagttagcggtcgcagatgtgcgctaatgcatataattttaacggctatttgcggtttgctcaatctatacgcaaagaagtttagatgtccagatgtattgacgtctattgtggtagtggttaatctgtggcctgactttcaccgactcagccaggaatatcttcatatgacgcgtaaacaggccactatcgcagtgcgtagcggattaaacgatgacgaacaatacggctgcgttgtgccgccaatccatctctccagtacctataactttaccggtttcaatgagccgcgcgcgcatgattattcccgccgcggtaatcccacgcgtgatgttgttcagcgcgcattagcggaactggaaggcggcgcgggcgcggtattgacgaataccggcatgtcggcgattcatctggtcaccaccgttttcctcaagccgggcgatctgctggtcgcgccgcatgattgctatggcggcagttatcgtctgtttgacagtctggcgacacgcggctgttatcgtgtgcggtttgtcgatcagggcgatgaacgcgccttacaggcggcgctggaagaaaaaccgaagctggtactggtagaaagtccaagtaatccattgttacgcgtggtggatattgcgaaaatctgtcggctggcgcgcgaggcgggcgcagtgagcgtcgttgataacacgtttttaagcccggcgctgcaaaatccgctggcgttgggtgccgatctggtgttgcattcatgcacgaaatatctcaacggtcattcggatgtcgtggccggcgtggtgattgcgaaagatccggaagtggtcactgaactggcgtggtgggcgaataatattggcgtgaccggcggggcgtttgatagctatctgctgctgcgcggtttgcgaactctggtgccgcgtatggagctggcgcagcgcaacgcgcaggcgattgtgaaatatctgcaaacccagccgttggtgaaaaaactgtatcacccgtcgctgccggaaaatcaggggcatgaaattgccgcgcgccagcaaaaaggctttggcgcaatgttgagttttgaactggatggggatgaggagacgctgcgtcgttttctgggcgggctgtcgctgtttacgctggcggaatctttagggggagtggaaagtttgatctctcacgccgccaccatgacgcatgccggtatgtcgccgcaggcgcgtgccgccgccgggatctccgaaacgctactgcgtatctccaccggtattgaagatggcgaagatttaattgccgacctggaaaatggcttccgggctgcaaacaaggggtaaacatgagtgtgattgcgcaggcaggggcgaaaggtcgtcaactgcataaatttggcggcagtagtctggcggatgtgaagtgttacctgcgtgtcgcaggcattatggcggagtattcgcagcctgacgatatgatggtagtgtccgccgcaggcagtaccaccaaccagttgattagctggctcaagttaagccagaccgatcgcctttctgcgcatcaggtattacagacgttacgccgctaccagtgcgatctgattagcgggctgcttcccgccgacgcggcagatgacttaaccagcgcttttatcagcgatctggaacgtcttgccgccttgctcgacggcggcgtaacggatgccgtctatgctgagattgtcggacacggcgaaatttggtcggcgagattgatgtccgccgtcctgaatcagcaggggctggatgccgcctggctggacgcgcgcgcatttttacgcgccgaacgcgccgcacagccgcaggttgatgaagggctatcttatcctttattgcaacagctactggcgcagcatccgggcaaacgtctggtcgtgaccggctttatcagccgcaatcatgacggcgaaacggtcctgttaggccggaacggttccgactattccgccacgcaaatcggcgcgctggcgggcgtttcccgcgtgaccatctggagcgatgtcgcgggcgtttatagtgccgacccgcgcaaagtgaaagatgcctgcctgctgccgttgctgcgtctggacgaagccagcgagctggcgcgtctggcggcgcctgttctgcacgcccgtacgctacagccagtgtccggcagcgatatcgatttgcagttgcgctgtagctacacgccggatcaagggtcaacccgaattgaacgagtgctggcttccgggacgggcgcgcgtatcgtgaccagtcacgatgatatctgtctgattgagtttcaggtgcccgccagccaggatttcaggctggcgcataaagagctcgaccaaattttaaaacgggcgcaggcgcgtccgctggcagtgggcgtgcatcgcgatcgccagctattgcagttctgctataccgccgaggtagcggatagcgtactgaaactcctcgacgatgtcgggctgccgggcgaattgcgcctgcggcaggggctggcgctggtggcgatggtcggtgcgggcgttactcgcaatccgctacactgccatcgcttctggcagcagcttaaaggtcagccagtggaatttacctggcagtcggaggagggcatcagtctggtggcggtgctgcgtaccggcccaactgagagcctgattcaggggctgcatcagtcggttttccgcgccgaaaaacgcattggcctgatgctgttcggtaaggggaacatcggctcccgttggctggaactgtttgcccgtgaacaaagcacgctttccgcgcgtactggctttgaatttgtgctggcgggcgtggtggatagccgccgtagcctgctgaattatgaagggctggatgccagccgcgcgctggcattctttgatgatgaagccgttgagcaggacgaagagtcgctattcctgtggatgcgtgcgcatccgtatgatgatttagtggtgctggatgtgacagcaagcgagcaactggccgatcagtatcttgatttcgccagccacggttttcatgtgattagcgccaataaactggcgggcgcaagcgccagcgataagtatcgccagattcatgacgcgtttgaaaaaaccgggcgttactggctgtataacgccaccgtgggcgcgggattgccgatcaaccacacggtgcgggatctgattgacagcggcgatacgattctctcgatcagcgggatcttctccgggacgctatcctggctgttcctgcaatttgacggcacggtgccgtttaccgatctggtggatcaggcctggcagcaggggctgaccgaacccgatccgcgcgtcgatctttccggaaaagatgtcatgcgtaagctggtgattctggcgcgcgaggcgggatactacatcgagccggatcaggtgcgtgtagaatcgttggtgccggcgcactgtgaagaagggtctatcgatcactttttcgaaaacggcgacgcgctgaatgaacagatggtgcagcgtctggaggcagcccgcgaactggggctggtgttgcgttacgtggcgcgtttcgacgccaatggcaaagcgcgcgtcggcgttgaagcggtgcgtccggaacatccgctggcggcgctgctgccgtgcgataatgtctttgctattgaaagccgctggtatcgcgataacccgctggtgatccgtgggccgggcgcgggccgcgatgtgaccgccggggcgattcagtcggatatcaaccgcctggcgcagttgctgtaataaaggcaagttcgtgagcgaagcgccgggttgcgcttcgctccctcatcaatacgttatgcagtcattctgtagatactgatatacgaagcgccatccgattgctgacgaaacattatggcgtgatgctttttacattctcaacccggacatccatccgggggtaaggaatattgatgccgttttcatccatcgcttccttgatattttccagaagatcgtagtaagtactccagtactgagcgttgggcacccatacgcgaacatagaaattcaggctagagggcgcaagttcgcccaggcggaccgtaatatcgcgggttttatcaatgcgatgatcttgttcaataatacgatgtatcacgctttttacgtcagcaatacggctttggtaatccacgccaataatcagatcaatacgtcgataggggtgtcgtgaatagttgataatattatcagcaataattttaccattcgggatgacaacttctttgctatccgcagtgagcagagtggtggagaaaatatggaccttttctactgtgccgataaccaggccaatttgtacaatttccccggcgcggaaaggacgcagggagacaagcagtacgcctgcggcaaagttggaaagtgccccttgcagcgccagaccaatggctaaacccgccgcgccgataacggcaataattgaggaggtttctataccgacacggccaagagcggctactgccgtgaaagctatcgtgatgtagcgaaccagcgcggagaaaaagtggacaatagtggcatccacttgccgcctgagaagtaatttttccagccccctcgatagtaagcgagctattaacttaccgatgaaaagtagaatgatggcggcaacaacattccagccaaaatgaattaccgagtcactgtgctcggccatccatttgatcgcgcctttaatttttggaaataactcaaaaccttccatgtttatcctctgtcagcagtatccgcggtattagcggtaataaaacggttcatttttgcctggataatcgccgcgccgacgggtggcagcagtaacgcccagaatagtgtccagccggttcgtattccgccatcttcgtttttattcgccagcagagcgcggatttcgtcgctaagcgtcagacacaatatggctgtgccaaacggcataatggctgacagccatcccgcgccacatgcggtcatgagtcggggcgaaggcgccacaaattgtatttcccggtgaattctgaagaaccaataaataatataaaatggaatgaaaaaggccaataatgcgacgacaacgggttctgcgcactcaggtcgctgggttgatgagaaccttttgggcggtgcaatatagaaaagttcttttttgagcggtaatagtagcaaaagcgcgataaccgctaaagtaattacggttattcctatataaggaattgagtatataaatatagacagatagccagcgatgataaatttgaacagtaagcagaggctaaataaaataacaaatgtctgagcactgccgatagcgctgaaaagcagcatggggactaacagcgttacgatccccatacccagattaattaaaaactgcgctatgataagcctgactacgtcagacgggccatttatgcagaaggaacagaccacgccaatgattaacaggagcgcaacaaagtagaaggggtaacaattttttatacggcagacaaaccagctggcaaccatacccaggaggtatcccagttggccgcaaacgagaataacaccaatacgatcggctggaatagacagtgatttactccaaaaataaacaccatacgacgatcccagcgaactgataaaagagagcaccaaaaagaaaaaagtgatcccccagaatcgatagctactcaggagatcggcgcaggtccattttttatctgacattgacggtaaagtaatttccatatttatcccttgttttccatagaaaataagaatgtatagaactatttaaattgataataaatattgattatgtgaataacgtttatagccaattttaacttaaaacgaagggccattttatcaaatagttctattctttttcagcgtataaaagtaggatgtgaggtgattaaatctatagcgccttctgaatgataatctgtgattttttatgcgtggcattacatcattgggttaaatgtgattccattgtgagttatatttttccgtcagcaaatacagaatttgcgtgacgcgtttggcggaatagtgggcgctttgctggaattcaggctgttgccatagccaggtaacaaagcggcgactagccgccagattaacggcgacaccttgttctaagtgggaaccggttaacgaacagaccattttgcggttgtgaccttgcccccagagctgccactgattttgccaccatccctgccatgttttgcctaacagttgccactctgcgcggcaatcgtcatcgtttatctcttcctcaacgaaccacagcgaggagagacgctggcgaaaccgctccgcccatgccgtaatgaccgcgccgcgcaaaaaacactcatgggcaatgatgtgtgtcgtgacatcaggaaaacggtttttcagcacccgaaaatgaccatgcgccgtaatgaccgggcgaagtattgttccttgcgcgttccgtttaagcgccgccgggccatactgaatctcatcgaactggctgcgctgtaaaaattgccgttctttaatggcgatacggtgaataatatcgcccttctcgccctcgggcggcgcaattcctttccagtggtaatgcaaactttttccggcagacagtaacgtgaaattgctggaaaggtgaagaatattgccgcgaacagcgtcaaaactgaataaaaagtacaattgctggaaggcattcgctccctgaaacggtacgagcagcggaatactgcaaatctgttccggcgtttcggcgacattcagcgcgtgctgttttggcgtccagactttcttacagtactggcactgaagtcgctgcgttccgccgggattacgtccataacgaatccatgttttttgatagcaatcggggcaaaagtgaccatgctctttggcatattgcgcgatataagcagacgcccagcggcgaaattccccctcgttgaagagcggcggataactgccgcaggctcgacaatgcaatgccggataacccaggcgatagtccggccacacataatccggcgagtcaggcagcccaagattgcgacaaccagcgcttttgcaggcattaatggtgaacagaggcggcattcattttaccaacgattttggcaggtcgttgattctgccttcataaagcggtacgcgggtgtgaggactctcacataaaaaaacctttcagaacgtaacgtagcgaatctttatatgactgaaagggacttatttatgaaagtaaaactgcttgctgccggtattttgttcacgctgccgttctgggcctgcgccaaagatgtcaccattatttacaccaacgatctacacgcccatgtggagccttataaagtaccgtggattgctgacggtaaacgcgatattggcggttgggccaatatcactacgctggtgaagcaggaaaaagccaaaaataaggcgacgtggttttttgatgccggagattactttaccggaccgtatatcagcagcctgacgaagggtaaagcgattatcgatattttgaataccatgcagtatgacgctgccactatcggtaatcatgagttcgatcatggctgggacaatacattgttgcaactgagccgagcaaaattccctatcgtgcagggcaatattttttatgaggacagcagtaaatccttctgggataagccgtacaccattgttgaaaaagatggcgtcaagattggcgtaatcggcttacacggtgtctttgcttttaatgatacggtatccgccgcgacgcgcgtgggcattgaggcacgcgatgagattaagtggctgcaacgttacattgatgaacttaaaggtaaagtcgatctgaccgtcgcgctgatccacgaaggcaccccggcccgccagtccagcatggggaataccgatgtgcgacgcgcgctggataaagatattcagaccgcaagtcaggtaaaagggctggatattttgattaccggccacgcgcatgtcggtacgccggaaccgattaaagtcggtaatacgctgattctttcaacggacagcggcggcattgatgtcggcaaattggtgctggactaccaggaaaagccgcatcagtttaccgtgaagaacttcgagctgaagaccatttttgctgatgagtggaagccagatccgcaaacgaaacaggtgatcgacggctggaacaaaaagctcgataaagtcgtgcagcaaacggtggcgcagtcgccggttgagctgacccgcgcgtatggcgaatcgtcgtcgctggggaatctggcggcggatgcgctgctttttacggcggggaaagacacccagttagcgcttactaactctggcggtatccgcaacgaaatcccggctggcgcggtgacgatgggggcggtaatcagtaccttcccgttccctaatgaactggtcacgatggatttaaccggtaaacaattgcgcagcctgatggagcatggcgctggcttaagcaacggcgtattgcaggtgtctaaagggctggagatgaagtatgacagcagcaaacctgtcggccagcgggttaccgtgctgacgctcaatggcaagccgattgatgatgcggcggtttatcacatcgctaccaacagcttccttgccgacggcggcgacggttttgcggcattcacggaaggccaggcgcggaatacctccggcggctactatgtgtcgaatgcgatagtcgattactttaaggcgggcaacaccatcacggatgagcagctcaaaggaatgcgcgttgcggatgtgaagaagtaaggggttacttgcctgtgcgcaatggcctttagcgcattcaggccggacggcggtatgtctggcctggatcattcgtggaccgcggatatcaaccgtctggcgtagcgcctgcaattttgccgggttacgcgctgtgttcccggcatgttcctgctgaaatttacccctctatccggtggtctgcgtcctgcgtaaaaagtggcggggtgcgggggaaactttccctgcgaaaatcatcgcatgatgaattttcgggggaaccgcatgataaacaacgatccgctttttgatctgcttaacaaagagcaacagcgccagcagcactcgctggaactgattgcctcggagaatttcgccagccctgccgttcttgcggcacaagggtcggtgttaaccaataaatacgccgaaggctattaccagcaccgctactacggcggctgtaagttcattgatgaggttgagatgctggcgataacccgcgcgcagcaacttttcggcgcgcgttacgttaacgtgcagcctcactccggcagccaggcgaatcaggcggtatatctggcgctgctgaaacccggcgacaaaattctgggcatgagcctgcaatgcggcggccatctcactcacggttcgccggtcaatcaatccggtaaatggtttaacgcctttcattatggcgtcgatgcgcatagcggtcttattgatatggatgaggttgagacgatcgcgaagcgtgagcgcccgcggctgattatcgccgggggatcggcctacccacgacactatgattttgcccgctttcgccgcattgccgatgccgtcggcgcgatactgctggtggatatggcgcattttgccgggctggtggcgggcggctgtttcccctcgccgctggcgtatgccgatgtgattaccaccaccacgcataaaacgttgcgcgggccgcgtggcggcatgattctggccaacgacgcccggctggcgaaaaaaatcgacagcgccatctttcccggcttgcagggcgggccgttgatgcacgttatcgcggctaaagcggtggcgcttggcgaagcgctacagcctgaatttaaacgttacgccgggcaggtaatcgaaaatgcgcaagcgatgtgtcagcaactggcgcagcgcggcctgacgctgttaacgggcggtaccgactgccatctgggcattatcgacctgcgcccgcaggggttaaccggcgcccaggtggaatactttctcgaactggcggggatcacggtcaataaaaacacgctgccaggcgatccgcagccgccgtcgattacctccgggattcgcattggcagcgcagcctgcgccacccgcggaatgaatgccgatgattttacgctgatcgcggactggatcagtgaaattatttttgccatcaagacgccgaatattacagatatttgcgccgatattcggcaaaaagtgactaaattaaccaccaactatccgttgccttaccaatgatgaaacttgctgaaattcaggcggcgtgcggcgttctttgtgtagatctcgccgctgtcgttgacaattatcaaacgctggcgcgccatgtcgcccccgcgcaatgcggcgcagtactgaaagccaatggctatggtctgggggcggaggcgattgcgccagccctgtatgcggccaattgccggatcttttttgtcgcgcaactttctgaaggggtggcgctacgtaaaatcctgtcggctgacgcgatggtggtgttgcttaatggcgtcatgccgcaggcgatgccgctttgttgcgcgcaacagatcacgccgttgctgaattctgttgaccaggtgatggcgtggctggcactacaggaggcgcggtcgcagcggcgtccggttttgatccagcttgattccggcatgtcgcggctgggggtgacgccggagcaactggcgcggctggccgcgatttttcgccagcgtggctgggctgcgccagactatatcatcagccatctggcgaacgccgacaggccggatcatgcgttaaatgtctatcagcatacgctactccagcaggcaaaagaggcattcccaaccagccgttattcgctggcaaattcctgcggtatgtttctgcatccggcctggcgggaagatctctgccgtccgggcgttgcgctgttcggcgtcgcccagccgtggttttcaacgccgttaaaaccggcatttacgctgacgctgagcattctgcgtgtgcaagacgtgccagttgggacgccgattggctacggcagtacggttactactactcgcccgctgcgtatcgccacggtatccgccggatacgctgatgggattccacgtaatttgcgtcctccggcgggcgtgtgctggcgcggggttcggttaccggtattggggcgggtttgcatggacagctttatggtggacgccagcgccatcatgccaacgcctggcgatgttgtggagtttattggcgtgagccagacgctggaagaggttgccgccgcctgcgataccatcccttatgagattatgacccggcttggcgggcgttttcggcgcataatgcagcccgcagaagcttgactccattttcaatctcgtagggggtaaacgcggcgaatcccagcagccagcccgtgggcgcggggtgcgtcagccagaactggcgcatcccggcgatgtttaacccggcccgccgcgcggcgttaagggtctgttgttcgtcaataccttcatgcagccagcagggcatttgtaatcctccgggcgtcacgaccggcgtcacccagtcactaagatgctgattgatggcctgcgccaggcacgcctgccgcaccgcgtacatactgcgcatggtgcggatatgggcggcaaaatggccggatgcgataaatcgcgccagcgtcaattgggtcaacgcgggcgttgcgccatcaagcaaattgcgcgcagcggcaaaatgcgcggccagcgacgcaggcaccaccagataaccaatgcgcagaccggggtagagcgttttgctgaaggtgccgacatacagggtgcgctgctcgcgatctaacccctgcatacaggcgacgggcgcgccgttgtagtgaaattcactgtcgtagtcatcttcgataatccaggcattatgcgtccgcgcccagtcaatcagggcatgacgccgcgccagagagagcaaatgaccggagggaaactggtgcgacggcgtaacgtaaaccagcggcgcaggcggcagtttatccacccgaataccgtctctatcgacttcaatgggaagaaggttgagctgtgcggcagagaatgcctgacgtgcgccgggatagcctggattttccatcaccaccgactgtccggcctctgccagcagttgcccgcatagccagaatgcctgacgcgcgccactgacaatcacaatctgctgcgcgtcgaccttcgcgccgcgttcaaaattgagataatgagcaatttgctggcgcagttccggctctccctgcggatcgccatgcagcattagcgtatgcgcccgctcgcgctggatctggcgggcaaaattctgccaaatggtttgcgggaagtttcgcgtttccgcaaggccgagcgtaaacgtctgcactcggcgggcatcgaaagatacggcgcgatcggcaatcgtctgccagcgggcgctaagtgtgggcgtctggcgaggcgatggcggcaggctgtgctgcccctgaatatgcggaatcccctggcggctggcgaaactcccggccccttgcctgcgggtcataaagccgtcgcgctgaagctgggaataggcattttcaaccgtatctctggacaggcgaagctgctgcgccagcgcgcgagcggacggcagttttgcgccatcgaccagcgcgccggaaatgaccaactgacgaaaagcgtggtacaggcgcagatgcagcggcaggttacgccacacttgcgcgtcgatcatgatatgtatcgactcgaaattcgctgtgttcatcttctggttcccccgtccctgcgtcgccaaagccgttgaatcatatcatttacgccttattttttatgtgttgaagaacacccggaaccgtatgaagaaggtattgctcaagatgatggagaatgaagttttttcaactttgctgaatattcctcattctttagcgtgatttttcagttgacgtccttctgcttttccgtcatttttacatctggacgtctaaacggatagatgtttacaacacaacaaataataacatgcgattgatgaggtaaggtatgagcttttttcacgccaaccagcgggaagccctgaatcagagcctggcggaagtacagggtcagattaacgtttcgtttgaatttttcccgccgcgcaccagtgaaatggagcaaaccctgtggaactccatcgatcgcctgagcagtctgaaaccgaagtttgtttcggtaacgtatggcgccaactccggggagcgcgaccgcactcatagcgttattaaaggcattaaagagcgtactgggcttgaggccgcgccgcaccttacctgtattgacgccacccgcgatgaactgcgcaccatcgcccgcgactactggaataacggtatccgccacattgtcgctttgcgcggcgatttgccgccggacagcggtaagccggagatgtacgccgccgatctggttggtttgctcaaagaggtggccgatttcgatatttcagtagcagcctatccggaggtacatccggaagcgaaaagcgcgcaggccgatctgcttaatctgaagcgtaaagtggatgctggcgctaaccgcgcgataacccaatttttcttcgatgtggaaagctacctgcgttttcgcgaccgctgtgtttctgccggtatcgacgtagagattattcccggcattttaccggtgtctaactttaaacaggcgaaaaaatttgccgatatgaccaatgtccgcattccgtcctggatgtcactgatgtttgaggggctggataatgacgcagaaacccgcaagctggtgggcgctaacattgcgatggacatggtgaaaattttaagccgtgaaggagtgaaggatttccacttctacacgttgaatcgtgcggaaatgagttatgccatttgccacacactgggcgtaagaccgggtttataacctccagctccctgccgggagctttattacacctcatattgatctacatctctgtaactaaaaatataaaaggtattagctatcgaatctgtggattaattcaactatatctatttgctcctggtgtatatcgtaacggtaacactttaaaagggagctgagatatgagcacgaccgacgatacccataacacgttatccactggaaaatgtcctttccatcagggggggcatgaccgaagcgcaggcgcagggactgccagccgcgactggtggccgaaccagcttcgcgtggatcttttgaatcaacattccaaccgttctaacccgctgggtgaagactttgactaccgcaaagagtttagcaagttagactactccgccctgaaaggggatctcaaggcgctgctgaccgattcacaaccgtggtggcccgccgactggggcagctatgtcggtttgtttattcgtatggcctggcatggcgctggcacctaccgttctattgatggtcgtggcggcgcgggtcgtggtcaacagcgttttgcgccgcttaactcctggccggataacgtcagcctggataaggcgcgtcgtttgttgtggccgattaagcagaaatatggccagaaaatttcctgggccgacctgtttattctggcgggtaacgtggcgctggaaaactccggcttccgtaccttcggttttggcgccgggcgtgaagatgtctgggaaccggatctggatgtgaactggggcgatgaaaaagcctggttgactcaccgacaccctgaagcgctggcaaaagcgccgctgggcgcgaccgagatgggccttatctacgttaacccggaagggccggatcacagcggcgaaccactttctgccgccgccgccattcgcgctacctttggcaatatggggatgaacgacgaagaaaccgtggcgttgatcgctggcgggcataccctcggtaaaacccacggcgcggcagcggcatcccatgtaggggccgatccggaagccgcgccgattgaagcgcagggcttaggttgggccagcagctatggtagcggcgttggcgcggatgctatcacctccgggctggaagtggtctggacgcagacgccgacccagtggagcaactatttcttcgagaacctgttcaaatatgagtgggtacaaacccgtagtccggctggcgctatccagtttgaagcggtagacgcgccggatatcatcccggacccgttcgatccgtcgaaaaaacgtaagccaaccatgctggtcaccgacctgacgctgcgttttgatccggagttcgagaagatttcccgccgtttccttaacgatccgcaggcctttaatgaagcctttgctcgtgcctggttcaaactgacgcacagagatatgggaccaaaagcgcgttacatcggaccggaagtgccgaaagaagatctgatctggcaggacccgttgccgcaaccgctctatcagccaacgcaggaagacattatcaacctgaaagcggcgatcgctgcatccgggctttctattagcgagatggtttcggttgcctgggcatccgcgtctactttccgcggcggcgataagcgtggcggcgctaacggcgcgcgtctggcattggcgcctcagcgcgactgggatgtcaacgccgttgcggctcgcgttctgccggtattagaagagatccagaaaacgacgaataaagcctcgctggccgatattattgtgctggcgggcgtggtcggtatcgagcaggcggccgctgctgcgggtgtcagcatcagcgtaccttttgcgccgggccgggtggatgcgcgtcaggatcagaccgacatcgagatgttctcgctgcttgaaccgattgccgatggattccgtaactatcgtgcgcgtctggatgtgtcgacgaccgaatcgctgttgattgataaagcgcagcagttaacgttgaccgcgccggaaatgacggtactggttggcgggatgcgtgtgctgggaaccaactttgacggcagccagaacggtgtctttaccgacagaccgggcgtgctcagcacagacttcttcgctaatctgctggatatgcgttacgagtggaaaccgaccgacgaatctaatgagctgttcgaaggccgggatcgtctgactggcgaggtgaaatacacggcgacccgcgccgatctggtgtttggttccaactccgtactgcgcgcgctggcggaagtttacgcgtgtagcgatgcgcacgagaagtttgtgaaggacttcgtcgcggcatgggtgaaagtgatgaacctggaccgtttcgatctgcaataatctgataggttaattcgtcagcggctgctattcggtagtcgctgacgttttccgcgtttaatgcgaaaaataacgaaaatgccccgttactttccagttaaataatacatcttcctcctgtgctcccgcgcctatgttatgcacaaccagcggcaccccttcaggcgtgacgttcagggacaccacgccaatatgcgcaaggccgttatccagccgccaggagacaatatctcccggttgataatcgctatatttatctgtcaccggcaacgctttgttttgacgctggaaccaggtttccagattcggaacgcggcgatggtcgatattgctgtccgggcgtttcagcttccagttattcgggtaggcagagaaatgcgcctgcatgtcttcatgtacccgtttctgtaaatcaacctgctgactgcgtagcgcgcggatgacgacatctgcacatactccacgctccagcggaagatcgccattcggataatccagacgaacataggcagcatcataaaatagcgtcttacctatttgtgtcccggcactttgggcgattgcagcattagtttgcgcctgaacggttattggtctggtatcagagcgtggcgaatgatgagagatatggctaataaaaaaagcagcaagaataccgataagcgcctgtgcgaatttcatcttcttcgtccgtgaagtgtgtcagtacgtcatttgactttccgcggagagaatggtgcgtgataaaaaagtctatttcaggacaaaatggactgattccaggctatggaatacctgatgatagcgcttcgcttacccggcctggatgattggataacaaggccagataaggtgcctgtgtcgatattcggcaactgaattctgttgggtcagcaagctgaaatactcctgactatcgtcaggagtattgctcagaccttattcccattcctgcaaaaagcgttgaccgtactggtcggcgaccagcagcgcggcgtacacttcatccggcgttgcgccgccaggcatgttatgaatagtttcaccttctgcgcaggaggcttccgcgacggtgcgcatttttgccggaatatcctgtttaatatccagttgcgccagcgtaatcggcaggccaacggaatggcacagcgccgcaacggtttcgatttcttcgaccggcgcgttttccagcaccagttgcgtcagcgtaccgaaagcgaccttctcaccgtgataatagtggtgcgcatccggaatcgccgttaaaccgttatgaatcgcgtgcgctgcggccagaccgccgctttcaaaaccgaccccgctcaggtaggtgttggcttcgatgacgcgttccagcgctggcgtgacgacgtgctgttcggcggccaacatggctttttcgccttcttcgatcagcgtgttatagcatagctccgccagcgccagcgcggcctgtgtacacttgccgcccgccattgtggtggcgccgctgcgtgagcaggcgcgcgcttcaaaccaggtcgccagcgcatcgccgataccggctgccagcagacgcgccggcgcgcccgccactatctgcgtatcgacaatgaccatattcgggttatgcggcagcagcagataacggtcaaactcaccggcatcggtataaataaccgagagtgcgctgcacggtgcgtcggtagaggcgatggtcggcgcgatagcgaccgggacattcataaagtgcgccagcgctttggcggtatccagcgttttaccgccgccgatacccagtacggcgccacactgacttttttcggcgacggcgcgcagcctgtcgatctcattttgcgaacattcgccgccaaacggggcgatttctactgacaaaccggcatccgtcaggcttttgcgcagcgtctcttcggcaaatcccagcacgaatttatcgcccacaaccagccagttgttcgccattggttttaaataatcgccaagacgcgcgatgacgtttgcaccctgaatatacttacctggtgactgaataatgcgatccatacatttctctcctacaggttcagattaccaaaagcgtttttccagtcttgctcaaacttctctattgctgactctaccgcaggcgtattgagcatttgttgcgctacatctaaaggaagggtaatcgcctggcaacctgccagtaagcaatccagcgcctgccgcggtgttttaaagctggccgccagtaccatgctgtcgggagcgtgatgttccagtagcgtttgcagctcctgaaccatacgaatgccatcgccgccctgcgcatcaacgcggttgacgtagggagcgacatattttgcgcccgccagcgccgccagcaggccctgcgacgcgctgtagacggcggtgcccagcgtcacgatgccttcttttttcagcaatttaatcgctgcaagaccttcggcggtcaccggaattttaaccacaatgccggggatggcgttattcagtcgtttggcttcttccaccatccctttcgcgtcgcggctcatggtctgcgcaaataaagtgccttcttcgccgatggcgttttgcagcctgggcagcacatcccagatagattctttgctggctgccacaatgcttggattggtggtgacgccggcaatcgggaaaatgcgcgccagacgttcaacttccgccacgttagcggtatccagatagagttccatagtctttcctttacagttcaagttcatgttgcagcaggctggcgatagcgtcggcggaagcggcgttaaccagcgtgttgcggaattcttcgtgcatgatgcggcgggccaggcgcgagaaaatacgcatatgctggtcgcccgcggcgtgtttgttaagcgtcagcataatgatgaactgcgcctcgtcatctccccagcgtaccggcgcgttcaggcgcgccacgctgatggtggactgttcgatatgttccgatttgctgtgcggaatggcaaagctaaagcccagtccggtggagaataccgcctcgcgcgcccatagatcggcttccagtttgcgcgggtagcggcagcggcccgccagcagcagattgtcggtcatgcctttaatcacctcctctttgctgcgccagtcgctatcaagcgttatgcattgggcggtaaccagcggggcatcctgctgcgacatgcggaactgcgccagcagatgctccacctccagcgaggtgcggcaggccatcgcctgattcaacaactggcggcaggctcggctgtcgagttgtgccatccgcgctttggcggcgggaatcgacggcgcgcccatgctgatctcgtccagccccagacctaccagcaatggcagaaccgaacctttggcccccagttcgccgcacagaccaatccatttgccctgacgatgtaccgcctgcaccgcgaaatccaacgcgcgcaggaaggcgggattcaggctgttgtagtgacgagtgactttggcgttatcacggtctaccgccagcaggtattgtgttagatcgttactaccaatactaaagaaatcaatctcttcacagcattgatcgatgatgaacatcaccgacggcacttccagcataatgccgagtgggatcttctcatcgaacgggatatgttcattacgcagctgctgtttggcttccgccagcttctctttgacccacagaatctcttccatagaggagatcatcgggatcatgattttcaggttgccgtgggcggacgcgcggaggatcgagcgtagctgggtggtaaacagagaagcgtactcttcataaatacggacggcgcgatagccgaggaatgggttggcttcggcaggaatattcagataatcaacgggcttatcgccgcctatatccattgtgcgcacaataatgctgcgtccctttgcggactccagcgcctggcaaaaaatattgtacagctcgttttcgtccggcgcgcaggcgcggtccatatacagcatttctgtgcggaacaggccaaccgcttccgcgccgttactaaaggccgcttgcgcctcgacggagtgcgcgatgttggcggcgacctccatgcggatgccgtcagcggtgcgcgcttcctgggtcagccagatgcgctgctgttcgcgcagggcgtcttgcacgcgggcttcctgctgatagtaacgagtgacaggctcgtcaggcgcaacgacaatcgcgcctgcgttgccgtcaatataaaccgtctgctgacgccacggtgttaaggcctcaatctccacgccaaccagggtgggaatgttgaatgagcgggcgagaatcaccgtgtgcgaagtgttgccgccgctttttaacagcagacctttgagaaaggttttatccagttcgaggaactggcttggcgtcaactcttccgccatacagatagatggccgggtcaactggcccggcgccggaaagcgctgctcaccgtaaatgtgttgcagtaactggaagcaaacgtcacgaacatccagcgcgcgttcctgtaaatagctgctgctggcgcgagcgaactcattgcagaaatggttcgcgctttccacgattgcctgcgcgcagcttaaaccgcgcagaacgccgtccagtaaatgctgacgcagtgaagcgtcgcctgccagcgaacgatgggcttccagaatcgcgctggcggcaccgtcactgtcgagctgacgaaactcaatatgctttatcaacatcgctaagccattgtccagcgcggcttgttccgtctctgtgtcgttggcggtcgggagttcgccgagcgcattgagatccagggaagagagtggcgtcagtacgccgcccgcgctgccgctacacacgctacgggcgcggtaaatctgcggattcagctgggtcaacgacgccggaagcggctccagttcgctgtttttaatctccgccagcggcgcgtcgcagagtgggaattcatcgcgcagccattgactcagacgctgacaggcaacctgttcatcggcaccggaaatcaccagctgacagtggtcgccagccagcgtgtcggtgccaatcagcgccagcgcgcttttggcgctgcctttgcgatcggtgcgcaggttgtgccactcaatttgcgacgtgaaggtattacacagcgtttctacgtggcttgccgggcgcgcatgtacgccattcggcagttcacaggtaaattccacaatcaggggcattgcctctctcccataacgattctctcgctacagcataaaaggaggtagccggaatacgccatgtgacaaatctgtcaaaagctggataaatgtaatgtagcgcaaaaagtgcgagttgtctcacaacttagcgtggtagcgcaggttttacctttttcagaagttatgaagcggatcgcatttttatactgatattacaaaaatccagtaaatggcctttttatccactgtctgcgcgacaatggattgcctattgttttccgcagtaactttatggacatgggctttatccagcccgggagcgacttatgaaagagttggtacagatcctgaaaaatacccgccagcacctgatgaccggtgtttcgcatatgatcccctttgtggtggctggcggaattttgctggcagtctccgtcatgctatatggcaagggcgccgtacccgatgccgccaccgatccgaatcttaaaaaactgtttgatattggtgtcgccgggctgacgctgatggtgcctttcctcgccgcatacattggctactccattgccgaacgctccgcgctggctccttgcgcgattggtgcctgggtgggtaacagcttcggcgcgggctttttcggggcacttatcgccggacttatcggcgggatcgtggtgcattacttgaagaaaatcccggtgcataaggtgctgcgttctgtgatgcctatttttgtgattcccatcgttggcacttttatcaccgcgggcatcatgatgtgggggctgggcgaaccgatcggtgcgctgacaagcagcctgacccaatggctgcaagggatgcagcagggcagcatcgtgctgctggcggtgatcatggggctgatgctggcttttgatatgggcggcccggttaataaagtcgcttatgcgttcatgctgatttgcgtggcgcagggcgtatataccgtggtggctatcgccgcggtgagcatctgcgtaccgccgctgggactggggctggcgacgctgattggccgcaagaatttttctgttgaagagcgcgaagccggtaaagccgcgctggtcatgggctgcgtgggcgtaacggaaggggcgattcctttcgccgctgccgatccgctgcgcgtgatcccatccattatggtgggctccgcttgcggtgcggtaatggccgcgctgtttggcgcgcagtgttatgccggttggggcggtttaattgttctgccagtcgtggaaggcaagctgggttatgtcgcggcagtcgccgtgggcgcggtggtaacggcagtctgcgttaacgtgctgaaaagcctgacgcgtaagaatgtgtcgcaagttgacgaaaaagaagacgacctggatttagattttgagatgaattaagcgaggaataagccatgactaaaattattgcagtaaccgcgtgtccttctggtgttgcgcatacctatatggcggctgaagcgctggaaagcgcagccaaagcgaaaggttgggatgtgaaagtggagactcagggctcgattgggctggaaaatgaactgacggcagaggatgtggcgagcgccgatatggtgattttgactaaagatatcggcatcaagttcgaagagcggtttgcgggtaaaactatcgttcgcgtcaatatcagcgacgcggtaaaacgcgccgacgccattatgaacaagattgacgcccatctttcgcaaaccgcgtaacgttaaaatgcccgatggcgcaagtttatcgggcctgctcacaggcccgataagagatttatgccgccatccggcgctcgtgtccacaggagctcctcatgacccatcgtattcaacgcctcaaagccgctctgtttcagaatcaccgtgaaatttctctggagcgcgcgctgctttataccgccagccatcagcagacggagggcgaaccggtcattttgcgccgcgccaaagcgacggcgtatatccttgaacatgttgaaatttcgattcgtgacgaggagctgattgccggaaaccgaaccgttaagccgcgcgcgggtattatgtcgccggaaatggacccgtattggctgcttaacgagctggatcggttcccgacgcgtccgcaggaccgttttgatatcagcgaagaggataagcgcctctatcgtgaggttctattcccgtactgggaaaaacggtcgatgaaagattttattaacgggcagatgaccgatgaggtgaaagccgccgtcagcacccagatttttagcattaaccagacggataaagggcaggggcatatcattattgattatccacgcttgctcaataacgggctgggtgaactggcggcgcagatgcgcgcgcgctgcgagcaacagccggaaaacgacttttatcaggccgctctgttgttacttgaggcatcgcaacgccacatcctgcgttatgccgtactggcggaacaccaggcggagcgctgcccggacgctcgtcgtcgtcaggaactgctcaccattgccgccaattcgcggcataacgcgcagcacaaaccacagacgttctggcaagcatgtcagctgttctggtacatgaacattattttgcagtacgagtccaacgccagttcgctgtcgctcgggcgcttcgaccagtacatgctgccgttttatcagacttcgctcactcagggcgacgatccggcgttcctgaaagagttgctcgagtcgctgtgggtgaaatgcaacgatatcgtgctgctgcgctccaccagtagcgcgcgctattttgccggtttcccgacgggttacaccgcgctgctgggcggattgacggaaagcggacgcagcgcggtaaacgtgctctcttttctctgcctggatgcctaccagagcgtgcagttgccgcagccgaatctcggcgtgcgcactaacgcgctgattgatacgccgttccttctcaagaccgccgagaccattcgcctcggtaccggcattccacagattttcaatgacgaagtggtggttcccgcgttccttaaccgtggcgtgtcgttggaggatgcgcgcgattatgcggtggtgggatgtgttgagctgtcgattccgggcagaacctacgggctgcatgacatcgccatgtttaatctgctgaaagtgatggaaatcagcttgtatgaaaatgagggcaacgacactcttacttatgaggcgttgctggcgcatattcgcgccaaaatcagtcactacattacactaatggtagaaggcagcaatatttgcgatatcggccatcgtgactgggcgccggtgccgctgctctcttcgtttatcagcgactgcctggagaaagggcgagacatcaccgacggcggcgcgcgctataacttttcgggcgtacagggcatcggtatcgccaacctgagtgattcccttcatgcgctcaatgggctggtattcgatcagcagcgcctgagttttgatgcgctgctgtcgatcctgaaaaacaacttcgccacgccagaaggggaaaagatccgcgccaggcttatcaaccgcttcgaaaaatatggcaacgacattgataatgtcgataacatcagcgccgaactgctgcggtattactgcaaagaggtggaaaaataccagaatccgcgcggcggccagtttacgccgggttcatacacggtttccgcgcatgtgccgctgggagcggtggtcggcgcgacaccggacgggcgttttgccggagaacagctggcggatggcggcctgtcgccgatgctcggacaggatatgcaagggccgacggcggtactaaaatcagtaagtaagttggataacacgctgctgtcgaacggtacgttgctgaacgtgaagtttactcctgcgactctggaaggagaggcgggactgcgcaagctggcggatttcctgcgcgcgtttacccagctcaaactgcagcacatccagtttaatgtggtgaatgccgacacattgcgcgaagcgcagctacggcctcaggatttcgctgggctggtggtgcgcgtggcgggctacagcgccttctttgtcgagctgtcgaaggagattcaggatgacattattcgccgcaccgcgcatcagttgtgaggttgtgggggcgcgcgatgaggagaccgcgcgtatcttcaatatccagcgctattcgctgaatgacgggcaggggattcgtacggtggtcttttttaagggctgtccgcatacctgtccgtggtgcgctaatccggaatctatctcgccgcgcattgaaacggtgcgccgggaaaataaatgcctgcgttgcacgccgtgtctgcgggatgccgacgaatgtccttccggcgcgtttgagcgtattgggcgtgatattacgctggatgaactggaacgcgaagtgctgaaagacgacatcttctttcgtacttccggcggcggggtgacgctttctggcggcgaagtgctgatgcaggcgccgttcgccacgcgcttcttacagcgattgcggcgttggggcgttccttgtgctattgaaacggctggcgatacgtcggccagccgtctactgccgttggcaagggcgtgtgatgaggtattgtttgatctgaaaattatggatgcggagcgggcgcgcgaggtgatcaacatgaatctgccgcgcgtactggagaatttacggttactggttagcgagggaatcacggtgatccctcgtttgccgttgattcctggctttacgcttaacgcagagaatctgcagtgcgcgttaacattgttgagatcattaggaataaagcaggttcacctgctaccgtttcatcagtacggcgagccgaaataccggctgcttggaaaatcatggatgatgaaagatattcccgcgccgtcggtgcaagagatcgctctgtttcgggagatggcggagcaagcaggatttcaggtcaccacaggaggttaatatggcagtacctgtacggcatctggtggcagtgaccgcctgcgtgagcggtgtagcgcatacctatatggctgctgaacggctggaaaaactttgccagcaggagaagtggagcatcaagattgaaacccagggggcactcggtacagagaaccgcttaacggaagaggatatccgccgtgccgatgtcgtgttgctcattaccgatatcgagctggcgggcgtggagcgatttacccggagtcgctatgtccagtcggggatcagcgcttttttgcgggagccacagcgggtaatgagcgctgtgcgtaaactcctttccgcgccgcaacatacccaccttatcctggagtaatctgcttttccgttagctggctgtgatactggcggcgatactccgacggcgagcgttccgtatttttgcgaaacaggcggcagaaatagttactgtcgacaaagccgcaacggtgcgccacctctttcactttcaggtcatagcccttcagcaacgttttggcgtgttccagtcgcgtatggttcaggtattcgttaaagccgatggcccccgttttctggaacaggtgcgagaggtaatttggcgagatataaaacgcttgtgctaccgattcgcgcgtcaacggcgcggcgtagcgttcatcaatatactcccgaatggcttcaaaaagcgcgcggctgcgggaggcggtctggatttggctgccgagcagatcgcggcaatggcttagcaggctggcgacaatcaatctggccgtttgctgctcttgcggctgcatctgcatctcattaagcgtttgtaacaggaacgagccgatacgcgggccgcggcgcgcaacgtgctgtttcgtgaggttttgatgctgctgaccatcccagtggactacgctgaaacctaactgctgtttgccaaacagaatgctcagggtggtgacgggcgtttgccattgcgggatgttccagccgccagccggaacgtagagaacatcgcaaggaatgagcggggcggtaatgctcatgtcagtaagctcgccctccagcacaatctccagccgcggaaaatccacctggtacgccagttccggcgctgggccgctggcgctggcaaaataaatctggcgcagcggcagcgggccgttgatgagacgggagagaaggtggctgacgtcgtgatacatgataatcccctgccgatcgcaaacagaggaaacagtaacgtcgaaaaccgatgtcctcaagcgattattgccggatagcggcgctttgcgccttatccggactacgggagagaagcacgccaggcccgataagcgttagcgttatcgggcaacatacaggctattgattaccgacctgatcgccatacggcaacgtatcataatcaatcagcgcgtttttcttatacgggttgccaatccagcgcgtggtctctttgaactgcgggttggtgatggagcgcgtcgggtcgtagccatcataggtcaggcccgctaagtcagaccaggtatggataagctcggaactgctgtacttacgatcgacatcctgtgagaagtcgcgcggatgcgctgcctgccatttctctgaggtccacagcaggaacggcaccgtatacatatgacgggttggcgaatcttcgtttcgtccctgcgtcttatgcggcggcgtgtcatacacttcttcaccgtgatcggagaagtagagcaggaaaccgttcggatcggtcgctttatagtccttaatcaggctggcgacaacatagtcattatacaggttcgcgttgtcgtaatcgttatacgattccagttcgtcgctgcttaatcccggcggaacatggtcggttttaccatcaaacttgccctggttttctggatagcggaacttgtatttaatgtgcgttcccagcagatgcacaataatgaattttttcggcgccgggtcggctaacaccgctttaaacggctccagcacgttgctgtcatattcgcgtgcgctttgagtgcgctgctggttcatatagaactgcttatcagtctgcttagagaacacggtcagcatggtattacgcgccgtcatcgtctgctggttagtgatccagaaggttttatacccggcctgtttcatcatattcatcagcgatggcttcgtcagataccagtccgggttcttttcgtccgcgaacgttagcgcctgttgcaggatctcaatggtgtacggtcgcgaagttaccacattattaaacacggtcagcccggggtcggttttatgcagcgcgtccagttccggcgtggtttcgcgcggataaccgtacagactcatacggccacgctgggtcgattcgccaatcaccagtaccagtgtgcgcggcgcatcgccggagtggtcctggaagttagccagcggcggcagggcatcgttttcattcagcagtttattcagcgaggcgagctgtaaacggtactgatagtagccagtaataaattgccacggcgcggcgggttccattcgtgacgccaggctatccagcgttttctccatcgacttatgcttgataaaggtattcatcgcgatgggatggaggatcagcccgtacagcagggcaaacgacaccagataacgccagggcgatggaatataaaccgggcgcagacgtgtccacagcaaaatcgccgccaccgtataagccagcgcgacaagaacaattttcagactgaaatattggcttaaatattcgctggcttcattggcgttggtttcaaacatcacaaacagcacgctttgcgagaactcctgcccgtagattacgtaatagctcagcgccgccagcgaggcggcccagagtacgacgccaataacggccgcaataacccggatgcggcctggaaacagaaagaccgggatcagccacagtgagctgtacagtagcgaatcccgcagaccgtttgtcccgctgtatccggtgagataaataatggcctgcaggagggtggaaaagaaccaaaagtagagcagtgcccagcccagggctttccagctaaacgcgggtttagtctggagtaatgtggattgcataatgagagcctgtctttaatcgtagcgccaaacgtaacgcctgaaccttaaaagaatctgaagcaaacctgctttatgccgcacgttttgctaagaaagatttacaaatgcataaaatgcagacaggaatatattgaaaaaatgacgaggatgacagcagtatttcatgccgcccccacataactgcgtgagagcggctctctttttgcgttagccggtgttgcgcataccggcggcgacgcccgcaatcgtgaccatcaacgcctgttcgacgcgaggatcgggcgatttgccctgctcttcagtcagacgggaacgatacagcaactcggcctgcaacacgtttaatggatcggtataaacgtttcttaactgaatggactccgcaatccacggtaagtcggccatcaggtgcgaatcgttggcaatcgccagcaccactttaatgtcttcttccagcaggtctcgtagctctttgcccagcggccatagcgttttcgccaccagacgctgatcgtaatagtcggccagccacaggtcggctttcgagaacaccatttccagcatcccaagacgcgtggagaagaacggccagtcgcggcacatggcttccagttcgctttgtttaccgtcttccaccactttttgcagcgcagtacccgcgcccagccaggctggcagcatcaggcggttttgcgtccaggcgaagatccacggaatcgcgcgcagcgattcgacgccgccagttggacgacgtttcgccggacgtgagccgagcggcaatttgcccaactcttgctccggcgtcgcggagcggaagtacggtacaaagtctttattttcgcgcacgtagccgcggtaggtttcacaggagatgacggaaagctcatccataatatgacgccagctgtctttcggttccggcggcggcagcaggtttgcttccagaattgcgctggtgtagagcgagaggctgctgacggtgacttccggcaggccgtatttgaagcggatcatctcgccctgctcggtcacgcgcagaccgcctttcagactgcctggcggttgcgaaagcagcgccgcgtgggctggcgcgccgccacggccaatagaaccgccgcggccgtggaagagggtaagctcgatgccggctttttcacaggttttgatcagggcgtcctgcgcctgatactgcgcccatgacgcggccatgacgccggcgtctttcgccgagtcggagtagccgatcatgaccatctgcttaccctgaatcagtccgcgataccagtcgatattcaacaactgggtcatcacgtcgtcggcattgttcaggtcgtcgagggtttcaaacagcggcgcgaccggcatggcaaagccgatacctgcctctttcagcagcagatgcacagccagcacatcagacggcgttttcgccattgaaattacgtaggcggcgatcgatccttttggcgcttcggcaataaccttgcaggtttcaagcacttcgcgggtatcgttgctcggctcccagttacgcggcagcagcggacgtttggagttcagctcgcggatcaggaaggcctgcttgtcggcttccgaccagctttcgtagtcgccaataccgaggtagcgggtaatttcgcccagcgcttcggtatggcgggtgctctcctgacggatatcaatacgcaccagcggtacgccgaaacacttcacgcggcggagcgtgtcgagtaactcgccgttggcgataatgcccatgccgcaggcctgtaacgactggtagcaggcgtacagaggttcccagagctgctcgttttgcgtcagcaggccagccggtttgggcagcttctcgcctttcagacgcgcttccagccaggactgggtcgccatcagacgggcgcgcaattttttcatcaggtagcgatacggctcagacgcgccttcttcgcccactaacgccagcagctccggcgtggcgtcgaccatcgacagttctgataccagaacatgaatgtctttcaggaacagatcggtggctttccagcggcttaacaagagcacgtggcgggtgatatccgccgtcacgttcgggttgccgtcacggtcgccgcccatccaggaggtaaaacgtaccggcacaaaatccaccggcaatttgtagccgagattttcttccagctgttcgttcagttcacgcagatagttaggtacgccctgccacaggctgttctcaaccacggcgaagccccatttggcttcatccaccgggcttgggcgctgcttgcggatctcatccgtatgccaggattgggcaatcaactggcgcaggcgacgcatcacctggtgacgttcgtagtcggcgatatcggtattatcaagctgtttcagacagttattgatttcacccatcttgtgaataagcgtacggcgggtaatttctgtcggatgggcggttagcaccaactccagcgacagcgactctaccgcttttttgatggttgcgtcgttgaggtccggttggtttttcagtttgcgcagagtgcgggcaatcacttccgggttgctggcggcttcgccttttggcgaaatgctgtggtattgctcggcagtattggccaggttcaggaactgactaaacgcgcgcgcaactggcagcagctcgtcattagacaaattttgtagcgtggtgagcagctcctggcgattagcttcattgccggcgcgtgaagatttggatagcttacggattgtttctacgcgatcaagaatgtgttctcccagcgcatccttgatggtttctcccagcaccttgccgagcatactgacattactacgcaacgcggaatattgttcgttcatatgaccccagacaccccatctttaatgtaattgccctgtctctttcatgccacagcggcagtggctgcgttcgcccgtatgccagttctgcggaatgggctcgtttgccgccttgctgtgacgtaaaatttttcggactttgctttttagccgtcttttataaagccacgtaaaacccgtggcgtcaattactgcgaaatcggttcagcaaacgaaaaaatggcggtaatttattaaagttaattcgcatcgtgccaaataagaaatgcttatgaacatgtggcgtagagacgccggatggcgctgcgcttatccggcctacaagacggggtaggcccggtaaacatcacgtcaccgggcaatatgcattaatgccagcaaaaatggtgtactacctgggtaatcaattcccgggttggcttaataaaacgcgtttcgagatattcatccggctgatgcgcctgattaattgagcccggaccaagcaccagcgttgggcataatgtctgcataaacggcgcttcagtacagtagttcaccacgtcggtttttgttcccaacagtttttctactacttcaaccagttggtggtccggtggacactcgtaacctggaatcggcggatgtaattccgccaccgtcaggcggcccggccagcgttcgcttaccggggccagcgcgtcgttaagcagtccattaaggtcgtttaacgtcatgcccggcagtggacgaatatccatatgcaattcgcagcaggcgcagatacggtttgaggcatcgccgccgtggatatggcccagattcagcgttggatacggaacggtaaacgcctcgtagtgataccgcgctttcagcgagtcacgcagttgcatgatatggccaatcgcatcgtgcatcagttcaatggcgttaaccccacgcgccgggtcgctggaatgaccggactgccccaggacgcgaacgacattagagatatgccctttgtgcgcgcgtatcggttgcaacgacgtcggttcgccaatgatcgcgcagtccggacgtaatgccgtggtttcggaaaaataacgcgcccccgccatgctggtctcttcatcggcggtcgccagaatgtagagcggctttttcaactttgtgacgtcaacgtcacgtagcgcgtccagaataaaagcgaagaagcctttcatatccgcagtgcccaggccatagagcttattgtcatgctcggtcagcgtgaacgggtcgcgcgtccagcgtccgtcatcaaagggaaccgtgtcggtatggccggtcagcagcaaaccgcccgcgccatgtccggtgctggcgagcatattaaatttgtttcgcgttcctggaaccggttgaacctctacgttgaaaccaagatcgctgaaccagcctgcaagcaaagtgattaaagacgcattactttgatccagggattcttcggttgcgcttatcgacggtgtggcaatcaaagcgcggtaaatctcgataaatggcggtaaaacgtttttcattgttgacacacctcaggtcatgatagtatcaatattcatgcattaattatgaataaaaatacattaacgttgagcataaaggaacccgatgttgaatacgctgattgtaggcgctagcggttatgcgggcgcagagcttgtaagctacgtaaatcgccacccacatatgaccataaccgctttgaccgtctcagcgcaaagcaatgatgcaggaaagttaatttctgatttacatccgcagttaaaagggattgtcgacctgccattgcaaccgatgtcggatgtacgtgattttagtgcagatgttgatgtggtgttcctggcgacagcgcatgaagtgagccacgatctggcgccgcaatttttacaggccggatgcgtcgtattcgatctttccggcgcgtttcgggtaaacgatcgcgccttctatgaaaagtactacggatttactcatcaatatcctgagctgctggagcaggcggtgtacggtctggcggagtggaatgccgataaactgaacacggcgaatctgattgcggttcctggttgctatccaaccgcagcgcagttgtcgctaaaaccgctgattgacggcgggcttctcgatctgacgcagtggccggtaattaatgccaccagcggggtgagcggcgcggggcgcaaggcggcaatatcgaacagtttctgtgaagtgagtttgcaaccgtatggcgtgtttacgcatcgtcatcagccggaaatcgctgcccatctgggcgcggaggtcatcttcaccccgcatctggggaatttcccgcgcgggattatggaaaccattacctgccgcctgaaagcgggagtaacccatgcgcaggtcgccgacgtgttgcaaaaagcctatggcgacaaaccgctggtgcgcctgtatgacaaaggcgttccggcgttaaagaacgtcgtcgggctgccgttctgcgatattggttttgccgtccagggcgaacatctaattgtggtggcaaccgaagacaacttgttgaaaggcgcagcggcgcaggcggtgcagtgcgctaatattcgttttggcttcgctgaaacgcagtctcttatttaagggtgaaatgatgaatccattaattatcaagctgggtggcgtattactggatagcgaagaggctctggaacgtctttttaccgcgctggtcaactatcgtgagtcccatcagcgtccgctggtgattgttcacggcggcggttgcgtggtggatgagctgatgaaagggcttaatttgccagtgaaaaagaaagacggcctgcgcgtgacgcctgccgatcagattggcatcattaccggcgcgctggcgggaaccgctaacaaaactctgctggcctgggcgaagaaacaccatatcgcctctgttggtctgtttctgggcgatggcgacagcgtaaacgtgacccaactcgatgaagcgttaggccacgtcgggctggcgcaaccggggtcgccgaagctgattaacatgctgctggaaaacggctttctgccggtggtcagctccattggcgtaacagacgacggccaactgatgaacgtcaacgccgatcaggcggcaaccgcgctggcggcgacgctgggggccgatctgatcctgctttctgacgtgagcggtattctggacggcaaaggccagcgtatcgccgaaatgacggcgtccaaagccgagcagcttatcgaccagggcattattaccgacgggatgattgtgaaagtgaatgcggctctcgatgctgcgcgggcgctgggtcgcccggtggatatcgcttcctggcgtcatgcggagcaactgccggcgctgtttaacggtacgccgattggcacgcgtattctggcttaactatttgttcgcccgatggcggctgcgccttatcgggcctgcgtgaacagaaattataggccggataagcgtagcgccatccggcagtgaaattcgaagaatttaaggaagtctattatggcactttggggtgggcgttttacacaggcggcagaccagcggtttaaacaattcaatgattcgttgcgcttcgattaccgtctggcggagcaggatattgtcggttctgtggcctggtccaaagcattggtcacggtaggcgtactgactgccgatgagcaacgacagttggaagaagcgctgaacgtgctgctggaagaggttcgcgtgaatccgcagcaaatcctgcaaagcgatgcggaagatatccatagctgggtggaaggtaagctcatcgacaaagtgggtcagttgggtaaaaagctgcacaccgggcgcagccgtaacgatcaggtggcgacggacctgaaactgtggtgcaaagagacggtgagggaactgcttaccgctaaccgccagctacagagcgcgctggtggaaaccgcgcaggcgaaccaggacgcggtaatgccgggatatacccatctgcaacgcgcgcagccagtgactttcgcccactggtgtctcgcgtatgtcgaaatgctggcgcgcgatgaaagccgcctgcaggacacgcttaaacgtctggacgtgagtccgctaggttgcggcgcgttggcgggaacggcctatgaaattgaccgtgaacaattggcaggctggctgggctttgcgtctgcgacccgcaacagcctggacagcgtgtccgatcgtgaccacgtactggaactgctttctgatgcggctatcggcatggtgcatctgtcacgcttcgcggaagatctgattttctttaattctggtgaagcgggttttgtagagctttctgaccgcgtgacttccggttcatcgttaatgccgcagaagaaaaacccggacgcgctggagctgattcgcggtaagtgcggtcgcgtacaaggggcgctaaccggcatgatgatgactttaaaaggtctgccgctggcgtataacaaagatatgcaggaagacaaagaagggctgttcgatgcgctcgatacctggcttgactgcctgcatatggcggcgttggtgctggacggtattcaggtgaaacgcccacgttgtcaggacgcggcgcaacaggggtatgccaacgccacggagctggcggattacctggtcgcgaaaggcgtgccgttccgcgaagcgcaccatattgtcggcgaagcggtggtagaagccattcgccagggtaagccgctggaagcgttgccgctggccgatttacagaaattcagccacgtgattggcgacgatgtgtatccgatgttgtctttgcagtcgtgtctggataaacgggcggcaaaaggcggcgtttctccgcagcaggtggcgcaggccatcgacgatgccagggcgcgcctcgcgttgtaggccttataagcgtaacgctatcaggtaatactgcccggccgagcatcagcgacgccgggcttttttacgcaaaaaaaagcggaccagaggtccgcaaaagttcacgttggctttagttatttcgggttcgagagataccctctgaacgggcggtgtcttcaagggttaaacgagaaaccgctccgttctgtgatgtattattaatcagaaaggttgatagggataatcgttcgttgctatgctacctatcgccatgaactatcgtggcgacggaggatgaataatgaatattcgtgatcttgaatatctggtggcgttagccgaacatcgccatttccggcgagcggcggactcctgtcacgtcagccagccaacccttagtgggcaaatacgtaagctggaagatgagctgggcgttatgctgctggagcgtacgagccgtaaagtgctgtttacccaggcgggcttactgctggtggatcaggcgcgtaccgtactgcgtgaggtcaaggtgctcaaggagatggcaagccaacaaggcgagacgatgtccggcccgctgcatattggtttaatcccaacaattggtccctatttgctgccgcttatcattccaatgttgcaccagactttcccgaagctggaaatgtatctgcatgaggcgcaaacgcatcagctgttagcgcaactcgatagcggcaagcttgactgcgctattctggcgctggtgaaagagagcgaggcgtttattgaagtgccgctgtttgatgagcccatgatgctggctatttatgaggatcatccgtgggcgaatcgcgatcgcgtgccgatgtccgatctggcgggcgagaaattgctgatgctggaagatggccactgtctgcgcgatcaggcgatggggttctgttttgaagcgggagcggatgaagatacccatttccgggcgaccagtctggaaacgctgcgcaacatggtggcggcgggcagtggtattacactactccccgcgctggccgtaccgcaggagcgtaagcgcgacggcgtggtttatctgccatgcattaagccggagccgcgtcgtaccgtggggctggtttatcgcccgggatcgccgctgcgtagccgttatgagcaactggcagaggccatccgtggcgcaatggatggccatttcgacaaggcgttaaaacaggcggtttaagccgttcaacgccgcaacccgataagcttccgccatggttgggtagttaaaggtggtgttaacgaagtattcgatggtgttaccgccacctttctgctccatgatcgcctggccgatatgaataatttcggcggcgcgttcgccaaagcagtgaatccccagaatttctttggtttcgcggtggaagagaatttttagcgtgccgacgttcatgccgacgatttgcgctcgcgccagatgcttaaattgcgcgcggcccacttcgtaaggcactttcattgccgttaactgctgctcggttttgccgacagaactgatttccggaatggtataaatcccggtggggatatcttcgatgagatgcgcggtcgcttcgcctttcaccagcgcctgcgctgcaatacgcccctgatcgtaggcggcggaggccagactgggatagccaatcacgtcgcccaccgcatagacgtgcggcagggcggtctggtacatactgttgactttgagctgtccacggctgtctgtttccaaaccaatattctccagcgccagcgaatcggtgttaccggtacggccattagcatagagcaggcagtcagccttcagttttttgccggatttcaggtgcatgatgacgccatcatcgcagccttcgattttctcatactcttcattgtggcgaataaccacgccgctattccagaaatggtaagagagagagtcggacatctcctgatcgagaaaggccagcaggcgatcgcgggtgttgatcagatccactttcacatccataccgcggaagatggacgcatattcgcagccgataacgccggcgccgtaaataataacgtggcgcggttcatggtggagactcaggattgagtcgctgtcataaatgcgcggatgcgagaaatccacatcattgggatggtaaggacgcgaaccacaggcaataacaaatttttctgccgtcagggtttcaaccgtgccgtcatggcattccagcgccagggtatgttcgtcaataaaatgggcgttgccctgcaatatttcacagtggttacgctcataaaacccctgacgcatacgcgtttgttgattaatcacgttatcggcatgattaaggatgtcggcgaaagaagaacgaaggagacgggagtggtcgctatagagcgggttttgattaaattcaataatgcggctgacggcgtggcgaagggctttggatgggatggtgccccagtgggtacatccgccgccaacgttatgataacgctcaatcaccgcgacgcgtgctccttgcttaaccagacccattgcagcgccttcaccgccggggcctgaccctatgacgactgcatcataatcccaggaatgtggcatggtattactcacctgtttttatacataaaataaacacgatgataacatttgcccagctttaacccaattatcgttgtgcttttttgcgaagccggagcacaaactgtctgtaaacaatcattcacaatccagtgtgaacccgttacttttattctctggtatagtgccgaataaggcatatggaaggattcagacattgtgatgggtgttagagcgcaacaaaaagaaaaaacccggcgttcgctggtggaagccgcattcagccaactgagcgctgagcggagttttgccagcctgagtttgcgtgaggtggcgcgtgaagcgggcattgcgccaacgtcgttttaccgtcattttcgcgatgtcgatgaactcggtctgacgatggtggatgaaagcggtctgatgctgcgtcagttgatgcgtcaggcgcgacagcgcatcgcgaaaggcggcagcgtcattcgcacgtcggtctccacatttatggagtttatcggcaacaaccccaacgccttccgtctgttgttgcgcgagcgttccggcacttcagcggcgtttcgtgccgccgtcgcgcgggagattcagcattttattgcggaacttgccgactatctggaactcgaaaaccatatgccgcgcgcgtttactgaagcccaggccgaagcgatggtgactattgtctttagcgcgggcgcagaggcgttggacatcggtgctgaacagcgtcggcaattagaagagcggctggtattgcaactgcgcatgattgcgaaaggggcgtattactggtatcgccgtgagcaagagaaaatagcacatcattccgaataacgtgaaggacgagtaatgaaacagtcaggtcaagataaaggtacgctgttgctggcgctcatcgctggcttatcgattaacggcacattcgcggcgctgtttagcgctattgtgccgttctccgtattcccggttatctcgctggtgctgacggtatattgcctgcatcagcgctaccaaaatcgtactatgccggtaggtttgccggggttggccgccgcttgtttcattcttggcgttttactgtatagcaccgtcgtgcgtgcagaatatccggatattggctctaatttcttcccggcggtgctgtcggtgattctggtattctggattggctttaaactgcgtaaccgcaagcaggacaccgcggaatagtgtgcgaatgccggatggcggtataaccggccatccgacgtacattttaccttgcggtgagtaataccccgcattccatatgatgcgtatacgggaactgatcgaatagcgccaggcgagacaccgtgtgcgtctggcttaacgtttccaggtttttgcacaacgtttccggattgcaggaaatgtacagaatacgtggataagcctgcaccattttttccgtttcgctgtccagaccgctgcgcggcggatcgacaaaaatggtttcgcactgatagcgcttcaggtcgatcccctgcaggcggttaaactcacgaacgccattcatcgcctgggtaaactcttccgccgccatgcgaataatttgcacattatcaatatgattagcggcaatattgtactgtgcggcagcgacggacggtttggcgatttcggttgccagcacgcggttaaaattgcgcgccagcgctaaagaaaaattgccgttgccgcaatacaactcaagcagatcgccttttgagtctttcgtcacctccagcgcccactctaacatctgaatattcatggcggcgtttggctgcgtaaagctgttttcgacctggcggtagatcatctctttacctgccacaggcagacgctcatcaatataatcctgatccaattcgattttagttttagtggcccggccaatcaggtgtacgttcagaccttgcgcgcgtaaagcatcgcgtaacgcagtggcggcttcacgccactcttcgtccagcttcttatggtacagcaacgacactaccgcctggttgctcaaggtcgtgagataatcgatctggaacagcttatgccgcagtgcatgattatcgcgcacgccggcaatcatcgccttcattaaggtattaatcagttggctggccgccgggaaggtgtcaacgcgaatccggcttttggtctgctgatcaaacataatgtggtacaggtcatcgccgtcatgccacaggcgaaattccgcacgcatacgatagtgactgaccggcgagcgaaatacttccggaaccaggccagaaaacggcgccatcatactctgcaagcgcgccactttttcggccagctgcgcctcatactgttctgtcggaagatgttcgggggtcatatcgcatcctgaataataaaagtacgcggggattgtagggattgctcagtggatgtccagctattgatgatttctgatttgtgatgcgcggtctggacagggtgttgtgacagacggtagcatccgtgggccggtcctgtgagttaatagggaatccagtgaaaatctggagctgacgcgcagcggtaaggaaaggtgagatgagagcgtaagcagacactgcctccggcgggaagtcatcatttctgctatccagtcaacggataaccctccaagcccgaagacctgccggctaacgtcgcatctggtttttcatcatcgcgtactatcgatgaagcctgcggcatccttcttatattgtggatgctttacaatgattaaaaaagctacgctgctgacggcgttctccgtcacggccttttccgcttgggcgcaggacactagcccggataccctggttgtcaccgccaaccgttttcagcagccgcgcagcgcggttctggcgcccgttaccatcgtgacgcgtcaggatattgaacgctggcaatcgacctccgtaaatgatgttctgcgccgtttgcctggcgtcgatattgcgcagagcggcggcgccggacaaaactcctccattttcattcgcggcaccaactccagccatgtactggtattgattgacggcgtgcgtctgaatttagcaggcgtgagcgggtccgccgatctcagccagttcccggtgtcgctggtacagcgcattgaatatattcgcggtccgcgctccgctatttatggttccgatgctatcggcggcgtagtgaatatcattacgacgcgcgataacccaggcacagaattaaccgctggatggggaagcaatagctaccagaattacgacatctcgacgcaacagcaacttggcgaaaacacgcgggcgacgttgatcggcgattacgaatacaccaaagggtttgacgtggtagcgaaaggcggtaccgggatgcaggcgcagcctgaccgggacggctttttgagtaaaacgctttatggcgcgttagagcataccttttctgatcgctggagcggattcgtgcgtggttatggctacgataaccgtaccgattacgacgcctattactcgccgggctcgccgctgattgatacacgcaaactttatagccaaagctgggacgccgggctgcgctttaatggcgaacgtattcagtctcagctggtttcaagctatagccacagtaaagattacaactatgatccgcactatggccggtatgatacctccgccacgctggatgagatgaaacagtacaatgttcaatggaccaacagtgtggtcgtggggcacggtaatgttggggcgggcgtagactggcagaaacagactaccacgccaggtaccggctatgtgcccgagggatatgaccagcgtaataccggggtttacctgacaggattacaacagttgggtgacttcactctggaagcggcggcgcgcagtgatgacaactcccagtttggtcgtcatggtacatggcaaaccagcgcgggatgggagtttatagaaggttatcgctttattgcctcctacggaacctcctacaaagcgcctaatttgggccagctgtatgggtattacggtaatccgaacctgaatcctgaaaagagtaaacagtgggaaggcgcatttgaagggctaaccgctggcgtcagctggcgtatttcaggttatcgtaacgatattaatgacatgatcgattatgacgatcatctgcaaaaatattacaacgaaggtaaggcgcgcattaaaggtattgaggcgacggcgaatttcgataccggaccgttaacgcatacggtcagttacgattacgttgatgcgcgtaatgcggttaccgatacgccattaccgcggcgttccaaacagatggcaaaatatcaacttgactgggacgtttacgattttgactggggggtgacatatcaataccttggttcccgctatgattcggattactccgcttacccataccggacagtaaaaatgggcggcgtcagtttatgggatcttacggttgcatatccggtcacctcacatctgacagttcgtggtaaaatagccaacctgttcgacaaagattacgagacagtttatggctaccaaactgcaggacgagaatacaccttgtctggcagctacaccttctgaaccacgtcccaccgtgctggtatttgattccggcgtcggtggattgtcggtctatgatgagattcggcggctcctgccggatctccactatatatatgctttcgataacgtggctttcccctacggggaaaagagcgaaacgtttatcgttgagcgcgttgtcgagattgtgaccgcggtacagcagcgctatcccctttcactggcggtgattgcctgtaataccgccagtacggtctcacttcccgcattacgtgaaaagtttgccttcccggtggtgggcgttgtgcctgcgattaaaccagcggcgcggctgaccgcaaatggcgtcgtcgggctactggcgacgagagccacggtcaaacgtccttatactcacgagctgattgcgcgcttcgccaatgaatgtcagatagcgatgttggggtcggcagaactggtggaactggcggaagctaaactacatggcgactcggtatcgctggaagagctgcgccgcatattacgcccatggctacgaatgccggagccgcctgacacggtcgttctggggtgtacgcatttccctctattacgggacgagcttttgcaagtcctgcctgaagggacgaggttagtggattccggcgcggcgatagcgcgtcgtacagcctggctgttggaacatgaagcgccggatgcgaaatcaaccgatgccaatattgcttattgcatggcaatgacgccaggagctgaacaattattacccgttttacagcgttatggctttgaaacgctcgaaaaactgccggtttaatggcgttttgggtaaataccaggcacttgagaaattattttaaatttcctcttgtcaggcagaaataactccctataatgcgccaccactggcacggaacaacggcacacaggccgccgggtcagcggggttcagaccagaacctcacggagaaaagcgaaaataaacgcttgactctgaagcgggaaagcgtaatatgcacaccccgcgccgctgagaaaaagcgaagcggcactgctctttaacaatttatcagacaatctgtgtgggcactcgaagatacggattcttaacgtcctcggacgaaaaatgaataccaagtctcaagagtgaacacgtaattcattacgaagtttaattctttgagcatcaaacttttaaattgaagagtttgatcatggctcagattgaacgctggcggcaggcctaacacatgcaagtcgaacggtaacaggaagcagcttgctgcttcgctgacgagtggcggacgggtgagtaatgtctgggaaactgcctgatggagggggataactactggaaacggtggctaataccgcataacgtcgcaagaccaaagagggggaccttcgggcctcttgccatcagatgtgcccagatgggattagcttgttggtgaggtaacggctcaccaaggcgacgatccctagctggtctgagaggatgaccagccacactggaactgagacacggtccagactcctacgggaggcagcagtggggaatattgcacaatgggcgcaagcctgatgcagccatgccgcgtgtatgaagaaggccttcgggttgtaaagtactttcagcggggaggaaggtgttgtggttaataaccgcagcaattgacgttacccgcagaagaagcaccggctaactccgtgccagcagccgcggtaatacggagggtgcaagcgttaatcggaattactgggcgtaaagcgcacgcaggcggtctgtcaagtcggatgtgaaatccccgggctcaacctgggaactgcattcgaaactggcaggcttgagtcttgtagaggggggtagaattccaggtgtagcggtgaaatgcgtagagatctggaggaataccggtggcgaaggcggccccctggacaaagactgacgctcaggtgcgaaagcgtggggagcaaacaggattagataccctggtagtccacgccgtaaacgatgtctacttggaggttgtgcccttgaggcgtggcttccggagctaacgcgttaagtagaccgcctggggagtacggccgcaaggttaaaactcaaatgaattgacgggggcccgcacaagcggtggagcatgtggtttaattcgatgcaacgcgaagaaccttacctggtcttgacatccacagaagaatccagagatggatttgtgccttcgggaactgtgagacaggtgctgcatggctgtcgtcagctcgtgttgtgaaatgttgggttaagtcccgcaacgagcgcaacccttatcctttgttgccagcggttaggccgggaactcaaaggagactgccagtgataaactggaggaaggtggggatgacgtcaagtcatcatggcccttacgaccagggctacacacgtgctacaatggcgcatacaaagagaagcgacctcgcgagagcaagcggacctcataaagtgcgtcgtagtccggattggagtctgcaactcgactccatgaagtcggaatcgctagtaatcgtggatcagaatgccacggtgaatacgttcccgggccttgtacacaccgcccgtcacaccatgggagtgggttgcaaaagaagtaggtagcttaaccttcgggagggcgcttaccactttgtgattcatgactggggtgaagtcgtaacaaggtaaccgtaggggaacctgcggttggatcacctccttaccttaaagaactgttctttgaagtgctcacacagattgtctgatgaaaaacgagcagtaaaacctctacaggcttgtagctcaggtggttagagcgcacccctgataagggtgaggtcggtggttcaagtccactcaggcctaccaaattttccctgaatactgcgttgtgaaataactcacatactgatgtatgcttcgttatcccacgccttgtctcaggaaaaattatcggtaaagaggttctgactacacgatggggctatagctcagctgggagagcgcctgctttgcacgcaggaggtctgcggttcgatcccgcatagctccaccatctcgtgagtgtttacgaaaaaatacttcagagtgtacctgaaagggttcactgcgaagttttgctctttaaaaatctggatcaagctgaaaattgaaacacagaacaacgaaaattgttcgtgagtctctcaaattttcgcaacacgatgatgaatcgtaagaaacatcttcgggttgtgaggttaagcgactaagcgtacacggtggatgccctggcagtcagaggcgatgaagggcgtgctaatctgcgataagcgccggtaaggtgatatgaaccgttataaccggcgatacccgaatggggaaacccagtgtgactcgtcacactatcattaactgaatccataggttaatgaggcgaaccgggggaactgaaacatctaagtaccccgaggaaaagaaatcaaccgagattcccccagtagcggcgagcgaacggggaggagcccagagcctgaatcagcatgtgtgttagtggaagcgtctggaaaggcgcgcgatacagggtgacagccccgtacacaaaagcgcatgtgctgtgagctcgatgagtagggcgggacacgtggtatcctgtctgaatatggggggaccatcctccaaggctaaatactcctgactgaccgatagtgaaccagtaccgtgagggaaaggcgaaaagaaccccggcgaggggagtgaaaaagaacctgaaaccgtgtacgtacaagcagtgggagcaccctttgggtgtgactgcgtaccttttgtataatgggtcagcgacttatattctgtagcaaggttaaccgaataggggagccggagggaaaccgagtcttaaccgggcgttaagttgcagggtatagacccgaaacccggtgatctagccatgggcaggttgaaggttgggtaacactaactggaggaccgaaccgactaatgttgaaaaattagcggatgacctgtggctgggggtgaaaggccaatcaaaccgggagatagctggttctccccgaaagctatttaggtagcgcctcgtgaattcatctccgggggtagagcactgtttcggctagggggccatcccggcttaccaacccgatgcaaactgcgaataccggagaatgttatcacgggagacacacggcgggtgctaacgtccgtcgtgaagagggaaacaacccagaccgccagctaaggtcccaaagtcatggttaagtgggaaacgatgtgggaaggcccagacagccaggatgttggcttagaagcagccatcatttaaagaaagcgtaatagctcactggtcgagtcggcctgcgcggaagatgtaacggggctaaaccatgcaccgaagctgcggcagcgacactgtgtgttgttgggtaggggagcgttctgtaagcctgcgaaggtggcctgtgagggttgctggaggtatcagaagtgcgaatgctgacataagtaacgataaagcgggtgaaaagcccgctcgccggaagaccaagggttcctgtccaacgttaatcggggcagggtgagtcgacccctaaggcgaggccgaaaggcgtagtcgatgggaaacgggttaatattcccgtacttggtgttactgcgaaggggggacggagaaggctatgttggccgggcgacggttgtcccggtttaagcgtgtaggtgtgtgttccaggtaaatccggttcactttaacactgaggcgtgacgacgaggcactacggtgctgaagcaacaaatgccctgcttccaggaaaagcctctaagcatcaggtaacatcaaatcgtaccccaaaccgacacaggtggtcaggtagagaataccaaggcgcttgagagaactcgggtgaaggaactaggcaaaatggtgccgtaacttcgggagaaggcacgctgacacgtaggtgaagtgatttactcatggagctgaagtcagtcgaagataccagctggctgcaactgtttattaaaaacacagcactgtgcaaacacgaaagtggacgtatacggtgtgacgcctgcccggtgccggaaggttaattgatggggtcagcgcaagcgaagctcctgatcgaagccccggtaaacggcggccgtaactataacggtcctaaggtagcgaaattccttgtcgggtaagttccgacctgcacgaatggcgtaatgatggccaggctgtctccacccgagactcagtgaaattgaactcgctgtgaagatgcagtgtacccgcggcaagacggaaagaccccgtgaacctttactatagcttgacactgaacattgagccttgatgtgtaggataggtgggaggctttgaagtgtggacgccagtctgcatggagccgaccttgaaataccaccctttaatgtttgatgttctaacgtggacccgttacccgggttgcggacagtgtctggtgggtagtttgactggggcggtctcctcctaaagagtaacggaggagcacgaaggttggctaatcctggtcggacatcaggaggttagtgcaatggcataagccagcttgactgcgagcgtgacggcgcgagcaggtgcgaaagcaggtcatagtgatccggtggttctgaatggaagggccatcgctcaacggataaaaggtactccggggataacaggctgataccgcccaagagttcatatcgacggcggtgtttggcacctcgatgtcggctcatcacatcctggggctgaagtaggtcccaagggtatggctgttcgccatttaaagtggtacgcgagctgggtttagaacgtcgtgagacagttcggtccctatctgccgtgggcgctggagaactgaggggggctgctcctagtacgagaggaccggagtggacgcatcactggtgttcgggttgtcatgccaatggcactgcccggtagctaaatgcggaagagataagtgctgaaagcatctaagcacgaaacttgccccgagatgagttctccctgagacttagagtctcctgaaggaacgttgaagacgacgacgttgataggccgggtgtgtaagcgcagcgatgcgttgagctaaccggtactaatgaaccgtgaggcttaaccttacaacgccgaagatgttttggcggatgagaagacgattttcagcagtgattcagagttgagtacgcaataatttgcgcagcagcaaggcggcaagcgaaggaaaggaaggagcatacagaagtatgtgactgagtttacgagcgcaggcaacgccgctgatgcgataaagaattgcgtacagagcacaaagaatttgcctggcggcagtagcgcggtggtcccacctgaccccatgccgaactcagaagtgaaacgccgtagcgccgatggtagtgtggggtctccccatgcgagagtagggaactgccaggcatcaaataaaacgaagggccctgtcggaagacagggccttttgttttatctgtagtctgccggatggcggctccgccttattcggcctacagggacgcgccgatctaccctcaatataaccacaagccttcccaacacagatacggtaaactattgccgattgagtatcaggaaagcagccatgacccactccctaaaaccctggaataccttcggcattgatcattgtgcaaagcacatcgtatgcgctgaaaacgaacaacaactactgagcgcctggcagcaagcaactcgtgagggactgccggttatgatcctgggtgaaggaagcaatgtcctgtttctggaaaattacgccggcaccgtgatccttaaccgcctgaaaggcattgaggtgaatgaaaccgcggacgcctggcacctacacgtcggcgcaggcgaaaactggcatcagctggttcgctacgcgctggacaacaacatgcccggcctggagaatctggcgctcatccctggctgcgttggttcctcgcctatacagaatattggcgcgtatggcgtagaactacagcgcgtctgcgactacgttgactgcgttgaactggaaacgggaaaacgtctgcgtttgtccgcggcggaatgccgtttcggctatcgtgacagtatcttcaaaaatgaatatcaggatcgcgttgcgatcgtcgcggtgggtctgcgtttgtcaaagcaatggcagccggtgttgacctatggcgatcttactcgtctggacccgaaaacggtcaccgcgcaacaggtgtttgatgctgtatgccatatgcgcaccacaaaattgccggatcctaaagtgaatggcaatgcgggcagcttttttaaaaatcccgttgtcgcagccgatatcgctatggaactgttagaacgatttcccaacgcgccgcattaccctcaggcagacggctcagtaaagctggcggcaggctggctgatagatcaatgtcagttgaaaggcgtcaccattggcggcgctgcggtgcatcgccaacaggcgctggtattgattaatgcgaatgatgcgacaagtaaagatgtggtggcgctggcgcatcatgtccggcaaaaagtgggtgaaaaatttaatgtctggctggagcctgaggttcgctttattggtcggtccggagaggtgaacgctgtggagagcattgcatgaaagatactaccgttcccctgacgctgatctcactacttgccgacggagagtttcactcaggcgagcagttgggtgaacggctgggaatgagccgcgcggcgattaataaacatatccagacattacgcgactggggagtagatgtatttaccgttcccgggaaaggatatagcttaccggaacccatccagttactggatgctgaccgtattcatagccaactggatagcggaaacgtggcggtattgcccgttatcgattcaaccaatcagtatttacttgatcgaattggcgagctgcgctcaggcgatgcctgtgtagcagaataccaacaggcggggcgtggtcgtcgcgggcgtaaatggttctcaccgtttggcgcgaatctatatctttcaatgtactggcgtctggagcagggccctgcggcggcaataggcctgagtctggtcattggaattgtgatggcggaagtgctgcgtgaactgggcgcagataaagttcgtgtgaagtggcctaacgacctttacctactggaccgcaaactggcgggtattctggtcgagttaaccggtaaaacgggcgatgccgcacaaatagtgattggcgctggtattaacatggcaatgcgtcgcgtagaagaggacgtgataaatcagggatggatcacactacaagaggccggaattacgctcgaccgcaatatgctggccgcaaagctgatttataagctacgtgctgcgcttgagctttttgagcaagaaggtctttctccttatctttcgcgctggaaaaaactggataattttattgatcgcccggtaaaactaattattggtgacaaagaaatatttggtatttctcgcggcattgatactcaaggcgcattattgcttgaacaggatggcgtgattaaaccctggatgggcggagaaatatcgctgcgaagcgccgaatagtaaaaaaggggagtcggtgctccccttttttctgttatttccgcaatcttacctgttccaccgcatggttagcgctcttagtcataataaggctggcacgttctcgcgtgggtaaaatattttgttttaaattcaaccagttaatttctttccaaagcgaagtcgctgtattaacagcttcttctttagataatttcgcataattgtggaaataagagtcaggatcggtaaacgccccttcgcggaatttcaggaagcgattgatataccacgtctgaagaagttcttctggcgcatcaacgtaaatagagaaatcaacgaaatcagagacaaatacatgatgcggatcgtgaggataatccataccgctttgtaaaacattcaaaccttcaagaatcaatatatcaggttgagcgacggttttatccccttcaggaataacatcgtaaatcaaatgagaatagactggcgccgtcacgttcggtacgcccgacttgaggtcagaaacgaatttcaccagtcggtgcatatcatacgattcggggaacccctttttcttcattaacccgcgttctttcaacacctggtttgggtggaggaagccgtcagtggtaatcaattcaacacggcggtgttccggccagcgactcagcaacgcttgcagaacgcgtgctgtcgtgcttttacccactgcgacgctgcccgcgatactgatgatgtaagggattcgctggccgttagtgcccaaaaactgttccaggacagcctgacgacgcagatttgaactgatatagaaatttagcaaacgggagagaggtaaatatatttctgcaacttcttccagcgataaatcttcattaatgccttttaactgcgcgatctcatcctcggtcagggtcatcggcacagaatcgcgaagcgcagcccactggctgcgatcaaactgtaggtaaggcgtcattaacgattgctcttttatactcataagcatgtttctggctgctattgctacatcagttcagcgatgaacgagggccatccctgacatgcaacggcacgtcacatttaagttaatttggacaatgggcaggagggtaacaccagatggggaggaataataagaaaaaatctcgctgtgaaagctatccctgagaagcaatgtgacgaatataccagatacagaagattgctttctatcgacggagcgttgaaatgccgcgtcgtattctggtcagacggtcagtaaaatgccgaaaatttatgctctcttgtttgaaattagagcatttttgtctcttatagcgcaaaatgtgagcgatagaacattttatgcaattttttagttgcatgagcacgcaggtctccatagaatgcgcgctacttgatgccgacttagctcagtaggtagagcaactgacttgtaatcagtaggtcaccagttcgattccggtagtcggcaccatcaagtccggtggggttcccgagcggccaaagggagcagactgtaaatctgccgtcacagacttcgaaggttcgaatccttcccccaccaccattttcggccgcgcgatggcgcagcccgagacgataagttcgcttaccggctcgaataaagagagtttctctcgatattcagtgcagaatgaaaatcaggtagccgagttccaggatgcgggcatcgtataatggctattacctcagccttccaagctgatgatgcgggttcgattcccgctgcccgctccaagatgtgctgatatagctcagttggtagagcgcacccttggtaagggtgaggtcggcagttcgaatctgcctatcagcaccacttcttttctccttcctgtttttctcttctgtttattagcattcaacaagtcgggcgtgttgcctggttgatgtggtgatatcaccgatttatccgtgtcttagagggacaatcgatgtctaaagaaaagtttgaacgtacaaaaccgcacgttaacgtcggtactatcggccacgttgaccatggtaaaacaacgctgaccgctgccattactaccgtactggctaaaacctacggcggtgccgcccgcgcattcgaccagatcgataacgcgccggaagaaaaagcgcgtggtatcaccatcaacacttctcacgttgaatacgataccccgacccgccactacgcacacgtagactgcccggggcacgccgactatgttaaaaacatgatcaccggtgctgctcagatggacggcgcgattctggttgttgctgcgactgacggcccgatgccgcagacccgtgagcacatcctgctgggtcgtcaggtaggcgttccgtacatcatcgtgttcctgaacaaatgcgacatggttgatgacgaagagctgctggaactggttgaaatggaagttcgtgaacttctgtctcagtacgacttcccgggcgacgacactccgatcgttcgtggttctgctctgaaagcgctggaaggcgacgcagagtgggaagcgaaaatcatcgaactggctggcttcctggattcttacatcccggaaccagagcgtgcgattgacaagccgttcctgctgccgatcgaagacgtattctccatctccggtcgtggtaccgttgttaccggtcgtgtagaacgcggtatcatcaaagtgggcgaagaagttgaaatcgttggtatcaaagagactcagaagtctacctgtactggcgttgaaatgttccgcaaactgctggacgaaggccgtgccggtgagaacgtaggtgttctgctgcgtggtatcaaacgtgaagaaatcgaacgtggtcaggtactggctaagccgggcaccatcaagccgcacaccaagttcgaatctgaagtgtacattctgtccaaagatgaaggcggccgtcacactccgttcttcaaaggctaccgtccgcagttctacttccgtactactgacgtgactggcaccatcgaactgccggaaggcgtagagatggtaatgccgggcgacaacatcaaaatggttgttaccctgatccacccgatcgcaatggacgacggtctgcgtttcgcaatccgtgaaggcggccgtaccgttggcgcgggcgttgttgctaaagttctcggctaatcgctgataacatttgacgcaatgcgcaataaaagggcatcatttgatgccctttttgcacgctttcacaccagaacctggctcatcagtgattttatttgtcataatcattgctgagacaggctctgtagagggcgtataatccgaaaggcgaataagcgtttcgatttggattgcctcgcgattgcggggtgaaaatgtttgtagaatacttctgacaggttggtttatgagtgcgaataccgaagctcaagggagcgggcgcggcctggaagcgatgaagtggatagttgttgccatattgctgatcgtcgcaatcgtcggcaactacctctatcgcgacatgatgctgccgctgcgtgcgctggccgtagtaattctgattgctgcagcgggtggtgtcgcgctgttgacgacaaaaggtaaagcaaccgttgcttttgcccgtgaagcgagaaccgaagtccgtaaggtcatttggccgactcgccaggaaacgctgcacaccacgctgatcgtcgctgcggttaccgcagttatgtcactgatcctgtggggactggatggtattctggttcgcctggtatcctttatcactggcctgaggttctgagatgtctgaagcacctaaaaagcgctggtacgtcgttcaggcgttttccggttttgaaggccgcgtagccacatcgctgcgcgagcatatcaaattacacaatatggaagagctgtttggcgaagtcatggtgccgactgaagaagtcgttgagatccgtggcggccagcgtcgcaaaagcgaacgcaaattcttcccgggttacgttctggtccagatggtcatgaacgacgcaagctggcacctggtgcgcagcgtgccgcgtgtgatgggctttatcggcggtacctctgaccgtccggcgccgatcagcgacaaagaagtcgatgcgatcatgaaccgcctgcagcaggttggcgataagccgcggccgaaaactctgtttgaaccgggtgaaatggttcgtgttaacgacggtccgttcgcagactttaacggcgttgtcgaagaagtcgattatgagaagtctcgcctgaaagtgtctgtttctatcttcggtcgtgcgaccccggtagagctggacttcagccaggttgagaaagcgtaaggctgcgatcaaaaaagcagcgatctaatcgttgcatagggcgcgaaattgacatacaatttcgcgccttttgtttttatgggccttatgcccataaagcgatatttatcacggggagcttctttgaagcgatactacccaattcgaggaatttagaatggctaagaaagtacaagcctacgtcaagctgcaggttgcagctggtatggcgaacccgagtccgccggttggtccagcactgggtcagcagggtgtgaacatcatggaattctgcaaagcgttcaacgcaaaaacggattccatcgaaaaaggtctgccgattccggttgttattaccgtttacgctgaccgttctttcaccttcgttaccaaaacgcctccggcagctgttctgctgaaaaaagcggctggtatcaagtctggttccggcaagccgaacaaagacaaagtaggtaaaatttcccgcgctcagctgcaggaaatcgcgcagaccaaagctgccgacatgaccggtgccgacattgaagcgatgactcgctccatcgaaggtactgcacgttccatgggcctggtagtggaggactaagaaatggctaaactgaccaagcgtatgcgcgtgatccgtgaaaaagttgatgcgaccaaacagtacgacatcaacgaagctattgccctgctgaaagagctggccactgctaaattcaacgaaagcgttgacgttgccgttaacctcggcatcgatgctcgtaaatctgaccagaacgttcgtggcgcgactgtactgccgcacggtactggccgttctgttcgcgttgccgtatttacccagggcccgaacgctgaagcagctaaagctgctggcgctgagctggtaggtatggaagatctggctgaccagatcaagaaaggcgaaatgaacttcgacgttgttatcgcatccccggatgcaatgcgcgttgttggccagctgggtcaagttctgggtccgcgcggcctgatgccaaacccgaaagtcggtaccgtaactccgaacgttgctgaagcggttaagaacgctaaagcaggtcaggttcgttaccgtaacgataaaaacggcatcatccacaccaccatcggtaaagtggactttgacgctgacaaactgaaagaaaacctggaagctctgctggttgcgctgaaaaaagcaaaaccgagccaggcgaaaggcgtgtacatcaagaaagttagcatctccaccaccatgggtgctggcgttgccgttgatcaggctggtctgagcgcatctgcgaactaagattagtctttacgtgggcggtgattttgtctacaatcttacccccacgtattctgctaattgcagacgtatatccgagatattcgggttgtggcaaggcggcaagtgagtgagtcgccaggagcatagctaactatgtgactggtgcgaacgaaggaagccaacgccgccacaagctgaatagcgacggatagacaagatttgttcgttggagcctggcctatccaggcctccgtcgaagaccgcaggcgtctcgcaagaggcttaatcccctgcgtagacggtgacagaacgctaagattatttttgatactctggcttgtttctgctcaccgtattaagacgctcttctcgttgagatgagtgaagtgagttccggaacatgagttccggcaaacatccaggagcaaagctaatggctttaaatcttcaagacaaacaagcgattgttgctgaagtcagcgaagtagccaaaggcgcgctgtctgcagtagttgcggattcccgtggcgtaactgtagataaaatgactgaactgcgtaaagcaggtcgtgaagctggcgtatacatgcgtgttgttcgtaacaccctgctgcgccgcgtcgttgaaggtactcagttcgagtgcctgaaagacacgtttgttggtccgaccctgattgcatactctatggaacacccgggcgctgctgctcgtctgttcaaagagttcgcgaaagcgaatgcaaaatttgaggtcaaagctgcagcctttgaaggtgagctgatcccggcgtctcagatcgaccgcctggcaactctgccgacctacgaagaagcaattgcacgcctgatggcaaccatgaaagaagcttcggctggcaaactggttcgcacactggctgctgtacgcgatgcaaaagaagctgcgtaatcgcagttgtctttatcaagcatttgcttacgtataaacttattctgatattcaggaacaatttaaatgtctatcactaaagatcaaatcattgaagcagtatccgctatgtccgtaatggacgttgtagaactgatttctgcaatggaagaaaaattcggtgtttctgctgctgctgctgtagctgtagctgctggcccggctgaagctgctgaagaaaaaactgaattcgacgtaattctgaaagctgctggcgctaacaaagttgctgttatcaaagcagtacgtggcgcaactggcctgggtctgaaagaagctaaagacctggtagaatctgctccggccgctctgaaagaaggcgtgagcaaagatgacgctgaagcactgaaaaaatctctggaagaagctggcgctgaagttgaagttaaataagccaacccttccggttgcagcctgagaaatcaggctgatggctggtgactttttagtcaccagcctttttgcgctgtaaggcgccagtagcgtttcacactgtttgactactgctgtgcctttcaatgcttgtttctatcgacgacttaatatactgcgacagagcgtacgttctgtgtaaatcgcaatgaaatggtttaagcgtgatagcaacaggcattgcggaaagtatccattttccggtcaacaaaatagtgttgcacaaactgtcccccgcaggacagatgggtcgacttgtcagcgagctgaggaaccctatggtttactcctataccgagaaaaaacgtattcgtaaggattttggtaaacgtccacaagttctggatgtaccttatctcctttctatccagcttgactcgtttcagaagtttatcgagcaagatcctgaagggcagtacggcctggaagcagccttccgttccgtgttcccgattcagagctacagcggtaattccgagctgcagtacgtcagctaccgccttggcgaaccggtgtttgacgttcaggaatgtcagatccgtggcgtgacctattccgcaccgctgcgcgtaaaactgcgtctggtgatctacgagcgcgaagcgccggaaggcaccgttaaagacattaaagaacaagaagtctacatgggcgaaattccgctcatgaccgacaacggtacctttgttatcaacggtactgagcgtgttatcgtttctcagctgcaccgtagtccgggcgtcttctttgactccgacaaaggtaaaacccactcttcgggtaaagtgctgtataacgcgcgcatcattccttaccgtggttcctggctggacttcgaattcgatccgaaggacaacctgttcgtgcgtatcgaccgtcgccgtaaactgcctgcgaccatcatcctgcgtgcgctgaactacaccactgagcagatccttgacctgttctttgagaaagtcgtcttcgaaattcgcgacaacaaactgcagatggagctgattccagaacgtctgcgcggcgaaaccgcgtcgttcgatatcgaagctaacggcaaagtgtacgttgaaaaaggccgtcgcattaccgcgcgtcacatccgtcagctggaaaaagacgatatcaagcatatcgaagttccggttgagtacatcgcaggtaaagtcgtctctaaagactacgttgacgaatccactggcgagctgatctgcgcggcgaacatggagctgagcctggatctgctggctaagttgagccagtccggccacaaacgtatcgaaacgctgtttaccaacgatctggaccacggcccgtacatttctgaaacggtacgcgtcgacccaaccaacgatcgtctgagcgcgctggtagaaatctaccgcatgatgcgccctggtgagccgccgactcgtgaagcggctgaaagcctgtttgagaacctgttcttctccgaagaccgctatgacctgtctgcggtgggtcgtatgaagttcaaccgttctctgctgcgcgacgaaatcgaaggttccggtatcctgagcaaagacgacatcattgatgtcatgaagaagctcatcgatatccgtaacggtaaaggcgaagtggatgatatcgaccacctcggcaaccgtcgtatccgttccgtcggcgaaatggcggaaaaccagttccgcgttggcctggtgcgtgtagagcgtgcggtgaaagagcgtctgtctctgggcgatctggataccctgatgcctcaggatatgatcaacgccaagccgatttccgccgcagtgaaagagttctttggttccagccagctgtctcagtttatggaccagaacaacccgctgtctgagattacgcacaaacgtcgtatctccgcactcggcccaggcggtctgacccgcgaacgcgcaggcttcgaagttcgagacgtacacccgacgcactacggtcgcgtatgtcctatcgaaacgccggaaggtccgaacatcggtctgatcaactccctgtccgtgtacgcacagactaacgaatatggcttccttgagacgccgtaccgtcgtgtggttgatggcgtggtcactgacgaaattcattacctgtctgctatcgaagaaggcaactacgttatcgctcaggcgaactccaacctggatgacgaaggccactttgtagaagatctggtgacctgccgtagcaaaggcgaatccagcttgttcagccgcgaccaggttgactacatggacgtttccacccagcaggtggtctccgtcggtgcgtccctgatcccgttcctggaacacgatgacgccaaccgtgcattgatgggtgcgaacatgcaacgtcaggcggttccgactctgcgcgctgacaagccgctggtgggtaccggtatggaacgtgctgtcgccgtcgactccggtgttactgcagtagctaaacgtggcggtactgttcagtacgtggatgcgtcccgtatcgttatcaaagttaacgaagacgagatgtacccgggtgaagcaggtatcgacatctataacctgaccaaatacacccgttctaaccagaacacctgtatcaaccagatgccatgtgtgtctctgggcgagccggttgagcgcggcgacgtgctggcagacggtccgtccaccgacctcggtgaactggcgctcggtcagaacatgcgcgtggcgttcatgccgtggaacggctacaacttcgaagactccatcctcgtttccgagcgtgttgtccaggaagaccgtttcaccaccatccacattcaggaactggcgtgcgtgtcccgtgacaccaagctggggccggaagagatcaccgctgacatcccgaacgtgggtgaagctgcgctctccaaactggatgaatccggtatcgtttacattggcgcggaagtgaccggcggcgacattctggtcggtaaggtgacgccgaaaggtgaaacccagctgacgccggaagagaaactgctgcgtgcgatcttcggtgagaaagcgtctgacgttaaagactcttctctgcgcgtacctaacggtgtctccggtacggttatcgacgttcaggtctttactcgcgatggcgtagaaaaagacaaacgtgctctggaaatcgaagagatgcagctcaagcaggcgaaaaaagacctgtctgaagaactgcagatcctcgaagcgggcctgtttagccgtatccgtgcggtgttggtgtccggcggcgttgaagctgagaagctcgacaaactgccgcgcgaccgctggctggaactcggtctgaccgacgaagagaaacaaaatcagctggaacaactggctgagcagtatgacgaactgaaacacgagttcgagaaaaaacttgaagcgaagcgccgtaaaatcacccagggcgacgatctggcgccgggcgtgctgaagatcgtgaaggtctatctggccgttaaacgccgtatccagccgggtgataagatggcaggtcgtcacggtaacaagggtgttatctctaagatcaacccgatcgaagacatgccttacgatgaaaacggcacgccggtcgacatcgtactgaacccgctgggcgtaccgtctcgtatgaacatcggtcagattctggaaacccacctgggtatggctgcgaaaggtattggcgacaagattaacgccatgctgaaacagcagcaggaagtcgcgaaactgcgcgaattcatccagcgtgcctacgatctgggcgccgacgttcgtcagaaagtcgacctgagcaccttcagcgatgatgaagtgctgcgtctggcagaaaacctgcgtaaaggtatgccgattgccacaccagtgtttgacggtgcgaaagaagcggaaatcaaagagctgctgaaactgggcgacctgccgacctccggtcagatcaccctgttcgatggccgtacgggtgaacagttcgaacgtccggtaaccgtcggttacatgtacatgctgaaactgaaccacctggttgatgacaagatgcatgcgcgttctaccggttcttacagcctggttactcagcagccgctgggtggtaaggcgcagttcggtggtcagcgcttcggggagatggaagtgtgggcgctggaagcttacggcgccgcctacaccctgcaggaaatgctcaccgttaagtctgatgacgtgaatggtcgtaccaagatgtataagaacatcgtggacggcaaccatcagatggaaccgggtatgccggaatccttcaacgttctgttgaaagagatccgctcgctgggcatcaacatcgaactggaagacgagtaattctcgctcaaacaggtcactggtgtcggggtaaaacccgacaccagattgtgctaactccgacgggagcaaatccgtgaaagatttattaaagtttctgaaagcgcagactaaaaccgaagagtttgatgcgatcaaaattgctctggcttcgccagacatgatccgttcatggtctttcggtgaagttaaaaagccggaaaccatcaactaccgtacgttcaaacctgagcgtgacggccttttctgcgcccgtatctttgggccggtaaaagactacgagtgcctgtgcggtaagtacaagcgcctgaaacaccgtggtgttatttgtgagaagtgcggcgttgaagtgacccagaccaaagtacgccgtgagcgtatgggccacatcgagctggcgtctccgactgctcacatctggttcctgaaatcgctgccgtcccgtatcggtctgctgctcgatatgccgttgcgcgatatcgaacgcgtactgtacttcgaatcttatgtggttatcgaaggcggtatgaccaacctggaacgtcaacagatcctgactgaagagcagtatctggacgcgctggaagagttcggtgacgaattcgacgcgaagatgggtgcggaagctatccaggccctgctgaagagcatggatctggagcaagagtgtgaaactctgcgcgaagagctgaacgaaaccaactccgaaaccaagcgtaagaagctgaccaagcgtatcaaactgctggaagccttcgtacagtctggcaacaagccagagtggatgatcctgaccgttctgccggttctgccgccagatctgcgtccgctggttccgctggatggtggtcgtttcgcgacttctgacctgaacgatctgtatcgtcgcgtcattaaccgtaacaaccgtctgaagcgtctgctggatctggctgcgccggacatcatcgtacgcaacgaaaaacgtatgctgcaggaagcggtcgacgccctgctggataacggtcgtcgcggtcgtgcgatcaccggttctaacaaacgtcctctgaaatctttggccgacatgatcaaaggtaagcagggtcgtttccgtcagaacctgctcggtaagcgtgttgactactccggtcgttctgtaatcaccgtaggtccataccttaggttgcatcagtgcggtctgccgaagaaaatggcgctggagctgttcaaaccgttcatctacggcaaactggaactgcgtggcctggccaccactatcaaagccgcgaagaaaatggttgagcgcgaagaagctgtcgtttgggatatcctggacgaagttatccgcgaacacccggtactgctgaaccgtgcaccaacactgcaccgtctgggtatccaggcatttgaaccggtactgatcgaaggtaaagctatccagctgcacccgctggtttgtgcggcatataacgctgacttcgatggtgaccagatggctgttcacgtaccgctgacgctggaagcccagcttgaagcgcgtgcgctgatgatgtctaccaacaacatcctgtctccggcgaacggcgaacctatcatcgttccgtctcaggacgtggtattgggtctgtactacatgacccgtgactgtgttaacgccaaaggcgaaggcatggtgctgactggcccgaaagaagctgagcgtatctatcgcgcaggtctggcctctctgcatgcgcgcgttaaagtgcgtatcactgaatatgaaaaagatgaaaacggcgaattcgttgcgcacaccagcctgaaagacacgaccgttggtcgcgccattctgtggatgatcgtaccgaaaggtctgcctttctccatcgtcaaccaggcgctgggcaagaaagcgatctccaaaatgctgaacacttgctaccgtattctgggcctgaaaccgaccgttatttttgcggaccagacgatgtacaccggctttgcttatgcagcgcgttcaggtgcgtccgttggtattgatgacatggtcatcccggagaaaaaacacgagatcatttctgaggcggaagctgaagttgctgagatccaggagcagttccagtctggtctggtaaccgctggcgaacgctataacaaagttatcgatatctgggctgcggcgaacgatcgtgtatctaaagcgatgatggataacctgcaaactgaaaccgtgattaaccgtgacggccaggaagagcagcaggtctccttcaacagcatctacatgatggccgactccggtgcgcgtggttctgcggcacagattcgtcagcttgctggtatgcgtggtctgatggcgaagccggatggctccatcatcgaaacgccaatcaccgcgaacttccgtgaaggtctgaacgtactccagtacttcatctccacccacggtgctcgtaaaggtctggcggataccgcactgaaaaccgcgaactccggttatctgacccgtcgtctggttgacgtcgcgcaggatctggtggtgaccgaagatgactgtggtacgcacgaaggtatcctgatgaccccggttatcgaggggggcgatgttaaagagccgctgcgtgaccgcgttctgggtcgtgtgacggcggaagatgtgctgaagccgggtacggcggacattctggttccacgcaacacgctgctgcacgaacagtggtgtgacctgctggaagcaaactccgttgacgccgttaaagtgcgttccgttgtatcctgcgacaccgactttggtgtatgtgcgcactgctatggtcgtgacctggcgcgtggccacatcatcaacaaaggtgaagctatcggcgttatcgcggcacagtccatcggtgaaccgggtacacagctgacgatgcgtacgttccacatcggtggtgcggcatcgcgtgcggctgctgaatccagcatccaggttaagaacaaaggtagcatcaagctcagcaacgtgaagtcggttgtgaactccagcggtaaactggttatcacttcccgtaacaccgaactgaagctgatcgacgaattcggtcgtaccaaagagagctataaagtgccttatggcgctgtcatggcgaaaggtgatggcgagcaggttgccggcggcgaaaccgtggcaaactgggacccgcacaccatgccggttatcaccgaagtgagtggtttcatccgcttcactgacatgatcgacggtcagaccattacgcgtcagaccgacgaactgaccggtttgtcttcgctggtggttctggattcggctgaacgtactaccggtggtaaagatctgcgtccggcgctgaaaatcgttgatgctcagggtaatgacgttctgatcccgggtaccgatatgcctgcgcagtacttcctgccgggtaaagcgattgtacagctggaagatggcgtacagatcagttctggtgacaccctggcgcgtattcctcaggaatccggcggtaccaaggatatcaccggtggtctgccgcgcgttgcggacctgttcgaagcgcgtcgtccgaaagaaccggccattctggcggaaatcgcaggtatcgtttccttcggtaaagaaaccaaaggcaaacgtcgtctggtgattacgccggttgatggtagcgatccgtacgaagagatgattccgaaatggcgtcagctcaacgtgttcgaaggggaacgtgtagaacgtggtgatgtgatttccgacggtccggaagcgccgcacgatattctgcgtctgcgtggtgttcatgctgtgacgcgttacatcgttaacgaagtccaggatgtataccgtctgcagggcgttaagattaacgataaacacatcgaagttatcgttcgtcagatgctgcgtaaagcgaccatcgaaagcgccggtagttccgacttcctggaaggcgaacaggttgaatattcccgcgtcaagatcgctaaccgcgagctggaagcgaacggcaaagtgggggctaccttctcccgcgatctgctgggtatcaccaaagcgtctctggcaaccgaatcgttcatctctgccgcatcgttccaggagaccacgcgtgtcctgaccgaagcagccgttgcgggtaaacgcgacgaactgcgcggcctgaaagagaacgttatcgtgggtcgtctgatcccggcgggtaccggttatgcgtaccaccaggatcgtatgcgccgtcgcgccgcgggcgagcagccagcaacaccgcaggtcactgcggaagatgcatctgcaagcctggcagaactgctgaacgcaggtctgggcggttctgataacgagtaatcgttaaatggtggaggggtatttatccctccaccagcttcatgctggataccgaattccgggtcgcttgcctacaaggaaagaaaatgccagcgattatttcattaatctatttaatgtttagtcttttagtatttacaaaaaagataaccatttcaaacgttctgtccgcttttttattgtttctatcgttatatatacttcaccataaatcattacttatatttatttattgtcttattattattgtcgccaccgctattcttcatcgagtcaaaaccagcgcggataaaaaagccgtattttatttttcaatgccatgctggctcttggttttatctgtaattataaatattaatgaataaatgaattattttttcatgactcttgtttctcgtattattggtgaaaaatcattatcactggttatatgaataaattgtccagtttttgtattatattttgccatcgcacagggaagactattaccaccgttagccataacaaattttgcttttgtattacgataaagattgacgccaggaatggggtcttgaccgaatgtataaggcgttgggacaattacattatgtttgtttgagagccactttgctaaaatcccgccaacgccatcaaccggcgtaataaaagtagagaatccacaatactcaaaattgaaattttttatcattgggtttgtttttttctgtaacattgattccaaatgtgactttaaatttatcccataaatctaagttattaaagtctattggctcgccattataaaatacctgctgttcatacattaaatgataaacctgttttattgattgtttacgcgggacattttaaattattaaatgaaggatttaattccattaaggtctttgtttgctcttattacaggaattataaatatgatgccatttctggaataaaagtaaagttaataaattatttatttaattgctcactggtagggtatttatgtatcctccggttaatgcttagtttagcatcttttagctgacagcgattgcaacgctaaaaaacatgtgctaataatcatcatgtaaaatatgtaatgaagtaagtatggagcatttaattgttatgatcccaccattaaatagatatgttcccgcgctttcaaaaaatgaattggttaaaactgttaccaacagggacattcagtttacaagttttaatggaaaagattatcccttgtgctttttagatgagaaaacccctcttcttttccagtggtttgagcggaatcctgctcgctttgggaaaaatgatatacctataattaacacagagaaaaacccctaccttaacaatatcattaaagcagcaacaattgaaaaagaacgtcttataggtatttttgtagatggtgatttttttccgggacaaaaggatgctttttcaaaacttgagtatgactatgaaaacataaaagtcatatatagaaatgatattgactttagtatgtacgataaaaaattatcagaaatttatatggaaaatatttctaagcaagagtccatgccagaagaaaaaagggattgtcatttactgcagctattgaaaaaagaattgagtgatattcaagagggtaatgattcattaattaaatcttacttactggataaaggccatggatggtttgatttttacaggaatatggctatgttaaaggctggtcagttatttttggaggcggataaggttgggtgttatgatttatcaacaaatagtgggtgtatatatcttgatgctgatatgattatcacggaaaaactggggggtatatatattccggatggaatcgctgttcatgtagaaaggatagatggccgtgcttctatggaaaacgggataatagctgttgatcgcaataaccacccggctttacttgctggattagaaataatgcatactaaatttgatgctgatccctattctgatggtgtatgtaatggaattagaaaacattttaattattctttaaatgaagattataattctttttgcgattttattgagtttaagcatgataacattataatgaataccagtcagtttacgcaaagttcatgggcgaggcatgtgcagtagcggaaatggcaataatcatgctattgaatacataaaatattggcataaactatcaagtttcggcgaaaaatatttgttgctcagttttctctactacaacgccactttaaaatcgcagtgctgttcagaacggagatatacggcattccttgtgaaatatgggagtaagaagagcttaaataatttaattggttattaaataacaattttatttatacagatatctgtcagattacatctggcttaaatttttgtcagcccagatgcgttttccatcaagtaacgttaccatcggcgtccggccgcaacacatttttccctgatgggttcgcccctgattcccgttgttctggggcatcattttatggacaaaaacgatcagcagacacggttggaagaggggccgccagcgaaattacagtcaggaacgctgcccgaaaacttcaagttcaccgctatttcgataatccagtggccagcccccggtcgtcagttactgatgaaggggtgaaggctgggcaataatgaggaagggatactttgccttggtcagcttccgttgctgacgatgacaaaataaaaaaacgggaggtcgataacaatctcccgtttttcacattacgtactcgctcgtgaaatactaatgcgtttacatacgggttcaccgaatttgcgaagcgcgccccagccaactgtcccagtctttccagacgggctgcaatccttgcgcgcttaacgcgcttgctactgtttcaggccgacgggcatcgtggggagaaaactgctccagttccggatgatcgtcagcgtagccgccgggctgcgttttcgagaaggcgctgacgttgttgattgccagaggaatcacatggtcacggaaccagggcgattcgcgggtggagagtgagagctcaatttctggcgccagtaaacgaaacgcgcaaatggtttgcaccagttgcttttcatccatcacagatgcgggttccacaccgccagtacacggacgcagacgcgggaaggaaacagaatagcgactctgccaatagtgtttctgcatccacaacagatgctccgccaccatatagcaatcaacccgccagctgtcggaaagcccgattagcgcgcctaaaccaattttgtcgatacctgcccggcctaaccgatccggcgtttccagccgccagaaaaagtcctgtttctttcccttcaggtgatgctgtgcatagattgcctcatggtaagtttcctgataaaccatcacgccatcgatccccagcgttttgagctccgcgtagttttcttgcgacaagggctggacttccatctgtaatgatgaaaattggcgacgaatggccgggagatggcggcggaaatagtccatgccgactttggcctgatgttcgccggtgaccaacagcagatgttcaaaacccagctcacggatagctgagcactcgcgggcaatttcagcctcatccagcgtcttacgcttaatgcggttgctcatcgagaagccgcagtaggtgcagtcgttggcacagaggtttgagagataaagcggcacgtagaaactgacggtgttgccaaagcgttgtcgggtcagcctttgtgcccgctgcgctatcggttccagataatcggcggcggcgggggagagcaacgccatcaaatcgtcccggctaagatgcgcggcgttcagcgcgcgctccacgtcggcggcagttttaccgttgatgcgcaggcgaatatcgtcccactccagttgccgccagcggtcggtgaaggttttcatgccagggcctccagaaagccggtgagcgggctggtggcgctggcgtaggtgctacgattccccggcaccgcctgacgcgccagtaatccggcttccaccgccagacggaaagcggttgccatcatcaccggatcgtccgccacggcaatcgccgtgttgaccagtaccgcatcagcgcccatttccagcgcctgcgccgcatggctgggcacgccgatcccggcgtcgaccaccaccggcacggtggcctgctggataataatctccagcatggttttggtttccagcccctgattcgaaccgataggcgcgccaagcggcatcaccgccgcgcagccgacctcttccaaccgcttgcacaacaccggatccgcgccgcagtagggcagcaccacaaaaccctgcttcaccagcgcctcggcggcttttagcgtttcgatcggatccggcaatagccagcgggcgtccgggtggatttctaatttcaaccagtttgtgcccagcgcttcacgcgccagctgggcggcgaagatcgcctcttcagcggttttcgccccggaggtattgggcagcagcgtgacgcccgcttcaatgagcggcgccagaatcgcatcgttgtgctgacgtaaatccacgcgcttcatcgccagcgtcaccagttggctgccggaagcgcgaattgcctcgaccatcagttgcgatgaggcaaatttcccggtaccggtgaacagatgtgaatcaaacgttttgtcggcaatacgtaacatctcaaccccctgcaataacctgaaaaagcaggatctggtcgccttcctgcacgatttgctgttcccactgctcgcgcggcaggatctgctgattgagcgccaacgctgcgcccggtttgagctggttgagctggataagcagcccgctgacggtttgccctgcggcgcactgcatcggctcatcattgaattgaatttgcatgctgccctccgcataccggacagccgctggcgcgacgcagcgcgaggctgcgccactggctggttttgccgtcaaacagacgtagctgcccgttcggtgtttcaataccgctgagtaatttaatcgcctccagcgcctgcaaggtacccatcacgcccaccaccggaccgagcaccccagcggtgcggcagttgcgttccggctccacatcatctggccacaggcagcggtaacagccttgttcccacggtggcatgagcaccatcaactggccgccaaagccgacggcgctggcggtgatgagtggggtattgagcgcaacgcaggcggcgttgatttcctggcgcgtggacatgttatcggtacagtcgagcaccacgtcggctcgcgagaccgcatgccggagcgcatcgccttttagtcgccgctggagcgagaccagttcgatatccgggttgagctgcgtcaggcgctgccgggcaacctgggatttcgaacgcgcgatatcatcggtggtaaacaggatctggcgctgcaaattgctcagatgaatgtcgtcatcgtctgccagcgtcagtttgccaatgcctgctcccgccagatacagcgcggcgggtgaacctaacccgcctaaacctacgatcagtacatgactcgcgagcagcttttgctggccttcaatggcgatatcgccgagcaggatttgccggctgtagcgcataaaatcgcggtcattcatcgccaactcccgcaatatccagtaactgcgcggtagcggcgcgccagtcggcggcctgagtaatggcgctgaccacggcaatactgccgacgccggtcgccagtaccgctgtggcgcgttcaaggctgatgccgccgatcgcgacggtcgggtaatccgccagtcgttcaatatgactggccaactgcgccagcccctgtggggcggaaggcatctgcttggtttgcgtggggaagacgtggccgagcgcgatataagaaggcttagcggcgagtgcgacgtcaatctccatatcatcgtgagtcgatacgcccaggcgtaaccccgccgcctgaatggccttcaggtcggtggtttcaaggtcttcctggccgagatgcacgccgtaagcgcggtgcttaattgccagacgccagtagtcgttgataaacagacgggcgttataacgacgccccagcgcgatggcagcgataacatccgcttccacctcttcatcgcgtttatctttgatacgcagctggatcgtgcgcacgcccgcctccagtagacgctcaatccatgcaacgctgtccaccaccgggtaaagcccgaggcggaacggcacggtcgggaaatcaggctgatacatcaggcttcctcccgtttgagataaatttcgccgcctttggcgcggaagttctccgacatatccgccatgccgacttcaatggcttgcgcggcggcgtagtcgcggacctcctggctgattttcatcgagcagaatttcggcccgcacatggaacagaagtgggcgactttgccggactcctgcggcagggtttcatcgtgataagcgcgggcggtgaacgggtcgagcgcgaggttaaactgatcttcccagcggaattcgaagcgcgctttcgacatggcgttatcgcggatctgcgcgcccggatgtcctttggctaaatccgcggcgtgggcggcgattttgtaggtgattagcccctgcttcacatcttctttgttcggcaggccgagatgctctttcggcgtcacataacacagcatcgcgcagccaaaccagccgatcatcgcggcaccgatcccggaggtgaagtggtcatagcccggcgcgatatcggtagtcaatggccctaaggtgtagaacggtgcttcatggcagctctccagctcttcggtcatgttgcgctgaatcatatgcatgggtacatgacccgggccttcaatcatcacctgcacgtcgtattcccaggcgattttggtcagctcgcccagcgtatgcagctcggagaactgcgcttcgtcgttggcgtcctgaatggagccggggcgcaggccgtcgcccaacgacagggaaacgtcgtaggcggcgcagatttcgcagatctcgcggaaatgttcgaacaggaagttctctttgtgatgggagagacaccacttcgccatgatcgaaccgccgcgcgagacaataccggtcaggcgtttggcggtcatcggcacgtagcgcagcagcacgccggcgtggatggtgaagtagtcgacgccctgttcggcctgctccagcagcgtgtcgcggaacgcttcccaggtaagatcttcggcgatcccgttgaccttttccagcgcctggtagatcgggacggtgccgatcggtaccgggctgttacgcaggatccattcgcgggtttcgtgaatatagcgaccggtggagaggtccatcaccgtgtccgcgccccagcgggttgaccacaccagcttctcgacctcttcttcgatggaggaggtgaccgccgagttaccgatgttggcattcactttgaccaggaagttgcggccaataatcatcggctccgattccgggtggttgatgttggcgggaataatcgcgcggcccgcggcgacttcatcacgcacgaattccggcgtaatgttttccggcaggcgcgcgccaaagctcatccccggatgctggtggcgcagcacttcactgcaaatgcgctcgcggcccatgttttcacggatggcgatgaactccatttcgggagtgacgatcccttggcgggcgtagtgtaactgggtgatgcgcttgcccgctttagcgcgttttggcgtcagcaggccggtaaaacgcagatcgtccaggccatcgtcggccagacgttctctggtataagccgagctacggtcgtctaattcttcgctatcgttacgtgcgtcaatccatggctggcgcagtttcgccagaccctgctggacgttaatcgccacctcaggatcgccataggggccggaggtgtcgtacaccggcacggcttcgttctcttcaaactgctggttgtctttactgccgccgatgagcgtcgggctcagttgaatttcacgcatcggtacgcgaatatcatgctgcgaaccggtcacgtagatgcgtttcgagttgggaaaggcagtcccttccagcgtatcgataaaatgctgggctttagcgcgctgctcgcggcgggttaacgttgttgtagacatagctcattccaaaaaattaaggacgtggcttgtcagacgacggatggagtaatggatgtgcgccgcccgtaaaggcagcagcataaagcagaattactcttgttcccttcgcaggtattaacctgatcaggttccgcggatcccgaattaacggtctcagccttttccacttcatccttcgcgctgcctcttcgttggcttcgtccgctcactccattcacttacttatgtaagctcctggagattcaccaacttgccgccttgacgcatcacgaacgcttttgtggaaaattagcactccgacaagataaccgcccctccgaagagggggctgaagtaaactacctgttactcgcgcagaactcaagcgggacgtttgactctggcgccgtcgtgcatcgcgtcaaacaccagcataatcagcttgtcttccagcacaaagcgggcttccagcgcttcgccgatatctgacagagcttgttgaaattcgagacaattatcgtgatcgatggcagtttccaggctggtgtcgtaataatccataatgcgctgcgtattatcttccagcagcggccagatttttgccgcatgtaaaagctgaccgtttccttccaatttatggagaatacgttcataaatactgaagtgcccggcggaaaggtaatcgaccaggctctgacaaaaatcatccagcgctttttcattcagccgcatgtacgattctttgccaggcttaatgccaaccagattgtagtaagccacgagcaggtgcttacgtacatccagccagcgatcgaccagtttgttgcttccgccaacgcgctccgtcaggttttccagctggtttagcatgattgtctccgcaagttagataaaggctgctcgccatgaatgtaaaaataatgttaacaacatgccagtgaagcaaaggtagtgcaatagctatggatcgtataattgaaaaattagagagtggctggtggatcgtcagccatgaacaaaaattatggttgccgtatggggaattaccacacgggctggcggcaaatttcgatcttgtggggcagcgcgcactccggataggtgaatggcaaggcgagcccgtttggctggtgttacagcatcgacgtcatgatatgggatcggttcgccaggttatcgatcaggatgcagggctgtttcaactggcgggacgtggcgtacagttggcggagttttatcgttcgcataaattttgcggctattgcgggcaccctatgcacccgagtaaaaccgaatgggcgatgctgtgcagccattgccgcgaacgctactatccgcaaattgccccctgcattatcgtcgcgatccgccgtgaggattccatcctgctggcccagcatgttcgccaccgcaacggcgtgcatacggtactggccgggtttgttgaagtcggcgaaaccttagaacaggcggtcgcgcgtgaagtgatggaggagagcggcattaaggtgaaaaatctgcgctatgtgacttcccagccgtggcctttcccgcagtcgctgatgactgctttcatggcggagtatgacagcggcgagattgtcatcgacccgaaagaactgttggaagcaaattggtaccgttatgacgatctgccgctactgccgccgccgggcaccgtcgcgcgccgtttgatcgaagatacggtggcaatgtgtcgggctgaatatgattgacatgttacactgggcgcatcaacgctaaaggaatgtaaaaatgaccgaactcaaaaacgatcgttatctacgtgcgctgctgcgccagcccgttgatgttacgccagtgtggatgatgcgccaggcgggccgttatctaccggagtacaaagccactcgcgctcaggcgggcgattttatgtcgctgtgcaaaaatgccgaactggcctgcgaggtcactttacagccgctgcgccgttatccgcttgatgcggcgatccttttctcggatatcctgacgattccggacgcgatgggcctggggctctattttgaagccggggaaggcccgcgctttacggcccctgtcacctgcaaagccgatgtcgataagctgcccattcccgatccggaagatgaactgggttatgtgatgaatgcagtgcgtacgattcgccgcgaactaaaaggcgaggttccgctgatcggcttttccggcagcccgtggacgctggcgacttacatggtggaaggcggcagtagcaaagccttcacggtgattaaaaagatgatgtacgctgacccgcaggcgttgcatctgctgctggataagttggcgaaaagcgtcacgctgtacctcaacgcgcaaatcaaagcgggcgcgcagtcggtgatgattttcgacacctggggcggcgtgctgactggccgcgattaccagcagttctccctctactacatgcataaaatcgtcgatggcctgctgcgtgaaaacgacggtcgccgcgtgccggtaacgctgttcactaaaggtggcggtcagtggctggaggcgatggcggaaaccggctgcgacgcgctgggtctcgactggacgacagatatcgccgatgcgcgccgtcgcgttggccataaagtggcgctgcagggcaatatggacccctcgatgctgtatgcgccaccggcacggatcgaagacgaagtagcgactatacttgctggtttcggtcagggagaagggcacgtctttaaccttggacatggcatccatcaggatgtgccgccagaacatgctggcgcatttgtggaggcagtgcaccgactttctgcgcagtatcacaactaaggagttagtatggatctcgcgtcgctacgcgctcaacagatagaacttgcttcatcggtttgccgcgaagatcgcctggacaaagatccgccagcgtttatcggcggggcggacgtcggttttgagcaggggggcgaggtgacgcgggcggcgatggtattgttgaaatatccgtcgcttgaactggtagagtacaaggtggcacgtattgccaccaccatgccgtatatccccggctttctctcttttcgtgaatatcctgcgctgctggcggcgtgggaacagctctcgcaaaagcccgatttgctgtttgtggacggtcacggtatttcgcatccgcgtcggcttggcgtcgccagtcattttggactgttggtggacgtgccgaccatcggcgtggcgaaaaaacggctatgcggtaaatttgaaccactttccaccgaacctggcgcacttagccccttaatggataaaggcgagcaactggcgtgggtatggcgcagcaaggcgcgctgtaatccgctgtttatcgcgacagggcaccgggtcagtactgacagcgcgctggcgtgggtacagcgctgtatgaaagggtatcgcctgccggagccgacgcgctgggcggatgccgtcgcttccggacgtccggcgtttgttcgttggcaagaaattcagcgctgattcaggtaaactgccgctaatttccgattcgagattccatcatgttacaaaacccgattcatttgcgtctggagcggctggaaagctggcagcacgttacctttatggcctgcttgtgcgagcgcatgtacccgaactacgccatgttttgcaagcagacggaattcggcgacggacagatctaccgtcgcattctggatctgatctgggaaaccctgacggtgaaagatgcaaaggtcaatttcgatagccaactggagaagtttgaagaggcaattccggcagctgacgactatgatctgtacggcgtttacccggcgattgatgcctgcgtcgcattaagcgaattaatgcattctcgccttagcggcgaaacgctggaacacgctattgaggttagtaagacttccattactacggtagcgatgttggaaatgactcaggctggtcgggaaatgaccgatgaggagctcaaaacgaaccctgccgttgaacaggaatgggatattcagtgggaaatattccgacttttagccgactgcgaagaacgtgatattgaactgataaaagggctcagggcagacctgcgcgaggctggcgagagcaatatcggtataaattttcagcaatgacaccagaaaacgtgatttaacgtctgatttgtcgtgccataaggcttcccttatgccccccgtctggtctacatttgggaggcgaaaaaaagtggctatcggtgcgtgtatgcaggagagtgcttttctggcatttccgtcgcactcgatgcttagcaagcgataaacacattgtaaggataacttatgaacaagactcaactgattgatgtaattgcagacaaagcagaactgtccaaaacccaggctaaagctgctctggaatccactctggctgctattactgagtctctgaaagaaggcgatgctgtacaactggttggtttcggtaccttcaaagtgaaccaccgtgctgagcgcactggccgtaacccacagaccggtaaagaaatcaaaatcgccgccgctaacgtaccggcgtttgtttctggtaaagctctgaaagacgcagttaagtaagacgcgtagctgtgaacagttttatcgaaggggctcgtcagccccttttgtctgtctggcgtcgcgcgtttctgttttctggcgcgctgttgctgactgcctgcagtcataacgcttcaccgcctccgtttactgccagcggctttgccggcgatcacggcgcggtgcgtatctggcgtaaagatacgaacgatgaagtccatctgctttctgtttttagcccgtggcatagcggcagcacgacgaccagcgaatatcgttggcagggtgatacgctttcgcttattgaactcaatatttacagcaaaccgccagaacatattcgcgcgcgtttcgacgctcatggcgaactcagttttatgcagcgtgaagtcggggggcagaagcagcagctttccaacgatcagattgccttgtatcgctatcgcgccgaacaaatccgtcagaccagcgacgccttgcgcctggggcgggtcatactacgccagggacgctggcacgccgaccatacggtaaccacctgtgaaggtgaaacgctgaaaccggatctggattcctgggcaataagccacattgagcgccgccagaaccactcatcggtagaggtgagcgtagcatggctggaggcgccggaaggatcgcaacttttgctggtggcgaattcagatttctgtcactggcagccgcaagcgaaaaccttttgatggaataccgaatggcgaagccgccattcggcatacatgctttaccagtttcccatacccatatgaccgccgccgcgatgataaccgccgccatagccgccgcaaccgccatagcccattcctgcgccgcgtggtatgccagcctgcgccatcgcgacatcccgtttcacgcgttgctcatctaacttctggcctaatgactccatctctttggcaaccgcgttaattttcgcagtatccggcgaactggcggtcagtagcgcgttgtattcataacgtttggatatcagttgctggcgcagcgcgctggtctgcgtatagtaatcatcataaatcttctgcgccgtcgcctgctgttccgtagttaacgggctacctccctgttgccacataccgtcattgttgccccagtgatgcccggcgaaggcggcgccggagctcagggccaaaagagagagggcgattagcgcgatagctgatttattgttccgtttcattttgcgttctcctgttgctcatcttatcctctctcttgcatcttccgtgccaggtaactattccttgtcgggcagcgagttaacccgcttcaggcggcaaaaagcgagtaaaaatgactcgcatgacccgcctggcgagtcatttttacccatccgtatccgaaagggtgtgcggcaacgcgcggttatgcggagcgaagaatggcatgatctctgcttaagtaaggaaaataaaaacgagccggggaagcctgtgagttttatacgattacataaagatgccgctgcaacgtggttgagtcggctgttacctgcggcgatcttcattctggtggggctattttccattatggtcattcgcgactatggccgtgagagcgctgccgccaggcagacgctgctggaaaagggaaatgtactcattcgcgctctggagtccggcacgcgagtaggtatgggaatgcggatgcatcacgcgcagcagcagacattgctggaagagatggcgggtcagccaggcgtgttgtggttcgccgtaacggatgcgcagggggtaatcatcactcatagcaaccctggcatggtgggcaaatcgctctattccgcatctgaaatgcatcaactaaaccccgggccgcaggagcgttggcggcgtgtcgacgttgctgctaacggcgagacggtgcctgcgctggaaatttaccgtcagttccagccgcttttcggtatgagaggtcacggtatgagggggcacggcatggcgcgtagcgccaatgacgacgaaccagcgaaacaaactatttttattgcctttgacgccagcgagctggccgcgacacaggcaagggagtggcgtaatacgctgattgttttgtctgcgttagcgacggtgctgttggcaacgttactggcgtttttttggcatcagcgttatcagcgctcgcacagagaactgcttgatgcaatgaagcgtaaagaaaagctggtggcgatggggcatctggcggcgggcgtcgcgcacgaaattcgtaacccgctctcgtccatcaaagggctggcgaaatactttgccgagcgcacgcctgccggcggcgagtcgcatgaactggcgcaggtgatggccaaagaggccgaccgtttgaaccgggtggtaagcgaattgctcgaactggtaaagcccgcgcatctgacgctccaggcggttaacctcaatgatattattactcactccctgaatctggtcagtcaggatgcccaaagcagagagattcagttgagattcacggcgaatgagacgcttaagcgtattcaggctgacccgaacaggctgactcaggtgctattgaatttgtacctgaacgctattcatgcgattggccgccagggaacgattaccgtagaggcaaaagaaagtgggaccgaccgcgttatcatcactgttaccgatagcgggaaagggatcgccccggatcagttggaggcgatttttacaccttattttacgaccaaagctgacgggacaggcctggggctggcggtggtgcaaaatatcatcgaacagcatggcggcgcgattaaggtgaaaagtattgagggtaaaggcgcggtctttactatctggttgccagtgatagcgagacaacaggattaacaagggtgatacgcggaaaaatcgatattctggttgtggatgatgatgtaagccactgcacgattttacaggcgctgcttcggggctggggctataacgtcgctctggcctacagtgggcatgatgcgttggctcaggtgcgtgagaaagtctttgatctggtactgtgcgatgtgcgtatggcggagatggacggtatcgctacgctgaaggagattaaagcgctcaaccccgccattccgattttgattatgacggcattctccagcgtggaaacggcggtagaggcgttgaaagccggcgcgctcgactatttaattaaaccgctggattttgaccgtctgcaggagacgctggaaaaggcgttggcgcatacgcgggaaacgggcgctgaattgccatcggcgtcggctgcgcagtttggcatgattggcagcagcccggcgatgcaacatttactgaatgaaatcgcgatggtcgcaccatcagacgccacggtattgattcacggagactccggcacgggtaaagagctggtggcgcgggcgctacacgcctgtagcgcccggagcgataaaccgctggtcacgctcaactgcgcggcgcttaatgaatcgctgctggagtccgagctgtttggtcacgaaaaaggtgcgtttaccggtgcggataaacgtcgggagggacgctttgtcgaagctgacggcgggacattgtttcttgatgaaatcggcgatatctcgccgttaatgcaggtacgtttgctgcgggcgattcaggagcgcgaagtgcaacgcgtgggaagtaaccagacgatatctgtggatgttcggttaattgccgctacccaccgcgatctggcggaagaggtgagtgctggtcgttttcgccaggatctctattaccgcctgaatgtggtggcgattgaaatgccttctttgcgccagcgtcgggaagatattccgctactggcagaccattttctgcggcgttttgccgaacgtaaccgaaaagcggtaaaggggtttacgccgcaggcgatggatctgctgatccactacgactggccgggcaatatccgtgagctggaaaacgctatcgagcgggcggtggtgttgctgacgggagaatacatttctgaacgcgaattgcctctcgctattgccgcgacgccgataaaaacggaatacagtggtgagatccaaccgctggtggacgtcgaaaaagaggtgattctggcggcgctggaaaaaacgggcggcaacaaaaccgaagccgcccgtcaattgggcattacgcgcaaaacgctgctggctaaactcagccgttagttctgttcacgctcgatggcgcgccagccgatgtcgttacggctgaagctgccgtcccagcggatgtcggtcatcaaggcgtaagcgcgtttctgcgcctcagccacggtgtggcccagcgcggtggcgcacagtacgcgaccgccgctggtcagcacacggtcgtcatcggcgagtttggtgcccgcgtggaaaaccttaccgtcagccacttcttccagcggcaggccgtggatctcatcgccagtgttgtagttgcccggataaccgcccgcggcgatcaccacgcctaatgaagcgcgctcgtcccactcggaggttttctcatccagcttgccgtcgcaggcggccaggcaaagatccaccagatccgacttcatgcgcagcatgatcggctgggtttccggatcgccgaagcggcagttgaactcgataactttcgggttgccctgcttgtcgatcatcagacccgcatacaggaacccggtataggtattcccttccgccgccatgcctttcacggttggccagatgatgcgttccatggtgcgctggtgcacttcatcagtgaccacgggagcaggagagtaagcccccatgccgccggtgttcgggccggtatcgccgttgcccacgcgtttgtgatcctggctggtggccatcggcagcacgtgctcgccgtcgaccatcacgataaagctcgcttcttcgccgtcgaggaactcttcaatcacgatgcggtggcccgcatcgccaaaggcgttgcctgccagcatgtcatggacggcggcttcggcttcttcgagcgtcatcgccacgataacgcctttgcccgcagccagaccatcggctttgatgacgatcggcgcgcctttctcacgcagataagccagggctggctcaatctcggtgaaattctggtattccgccgtcggaatctggtgacgagcgaggaaatctttggtgaacgctttggagccttccagttgggcggccccttcggttgggccaaagatcttcagacccgccgcgcggaacgcatcgaccacgccaatcaccagcggcgcttccgggccaacgatggtcaggtcaatcttctcgtgctgggcaaagctcagcagcgccggaatatcggtgacgccgatagccacgttctgcaacgcgggctccagcgcggtaccggcgttacccggtgcgacaaaaacagtatcaaccagcggcgactgtgcggctttccaggccagcgcgtgttcgcgtccgccgttaccaatcactaatactttcatgtttcgctccattaatggcggaagtggcgcatgtcagtgaagatcatcgcaataccgtgttcgtcggcagcggcaatcacttcgtcatcacggatagaaccgccaggctggatcacacagctcacgccaacggcggcagcggcatcaataccgtcacggaacgggaagaacgcgtcggaggccatcgcggaacctttcacttccagaccttcgtcagccgctttaatgccagcgattttcgcggagtacacgcggctcatctggcctgcgcctataccgatagtcatgttctctttcgcatacacaatggcgttggatttcacgaacttggcgaccttccagcagaacagcgcatcgcgcagctcctgctcggtcggctggcgtttagagaccacgcgcagttcagcttcgctcaccatacccagatccctgtcctgaaccagcaggccgccgttaacgcgtttaaagtcgaggcccggtacgcgctgtgcccactggccacaggtcaggacgcgaacgttctgtttagcggcagtgatcttcagcgcttcttcggtcgcagatggggcgatgatcacttccacgaactggcgggagatgatggcctgcgcggtttccgcatccagctcacggttaaaggcgataatgccgccgaacgcggaggtcgggtcggttttataggcgcgatcgtaagcgtcgagaatagaggtacttaccgccacgccgcacgggttagcgtgcttgacgattacgcaggctggctcgttgaacgctttcacacactccagcgccgcgtcggtatcggcgatgttgttgtaggaaagcgctttgccctgaacctgttgtgcggtggcaacggacgcttctttcacattctcttctatatagaaggcagcctgctggtggctgttctcgccatagcgcatatcctgcttcttaatgaagttcaggttcagcgtacgcgggaagcgaccggcggcttctttgctttcaccgtggtaggccggaaccatgctgccgaagtagttagcgatcatgctgtcgtaggcggcggtgtgttcgaaggctttaatcgagagatcgaaacgggtgtcgagggtcagagaaccttcgttagcatccatctctttaataatggcgtcgtagtcgctgctcttcaccacgatggccacgtctttatggttcttcgcggcggagcgcaccatcgttgggccaccgatatcaatgttctctaccgcatcttccagcgagcagccaacgcgtgccacggtttcggcgaacggatacaggttaacgacaaccatatcgataggggcgatgtggtgctgttccataatggcatcgtcctggccgcgacgaccgaggatgccgccgtggacttttggatgcagggtctttacgcgtccatccatcatttccgggaaaccggtgtaatcggaaacttcggtcaccgccagacctttttctgctaacaggcgggcggtgccccccgtagacagcagctccacaccgcgtgcggaaagtgcctgggcgaattcgatgataccggccttgtcagaaacactgagcagagcgcggcggactggacgacgttgttgcatggtaaatcccctggatttgacgattacagagagcgttagctgaatttttcgtgaaaaactcagctaacgccccttatggggtattctcattttgcggcgacattgtaacgaaaacgtttgcgcaacgctcgcgaatttttctttttaaattctggccccgcttttatccctgaaagatcatttgcagagtgagaagatccaggagatgaacgcgcattttgtggataagtctgtgcgtaaatgggtataaccaggggttttgctggggaatgcagcaaacagtcatttttctgcaatttttctattgcggtcagcagagaactccctataatgcgcctccatcgacacggcggatgtgaatcacttcacacaaacagccggtcggttgaagagaaaaatcctgaaattcagggttgactctgaaagaggaaagcgtaatatacgccacctcgcaacggtgagcgaaagccgcgttgcactgctctttaacaatttatcagacaatctgtgtgggcactcgaagatacggattcttaacgtcctcggacgaaaaatgaataccaagtctcaagagtgaacacgtaattcattacgaagtttaattctttgagcatcaaacttttaaattgaagagtttgatcatggctcagattgaacgctggcggcaggcctaacacatgcaagtcgaacggtaacaggaagcagcttgctgcttcgctgacgagtggcggacgggtgagtaatgtctgggaaactgcctgatggagggggataactactggaaacggtggctaataccgcataacgtcgcaagaccaaagagggggaccttcgggcctcttgccatcagatgtgcccagatgggattagcttgttggtgaggtaacggctcaccaaggcgacgatccctagctggtctgagaggatgaccagccacactggaactgagacacggtccagactcctacgggaggcagcagtggggaatattgcacaatgggcgcaagcctgatgcagccatgccgcgtgtatgaagaaggccttcgggttgtaaagtactttcagcggggaggaaggtgttgtggttaataaccgcagcaattgacgttacccgcagaagaagcaccggctaactccgtgccagcagccgcggtaatacggagggtgcaagcgttaatcggaattactgggcgtaaagcgcacgcaggcggtctgtcaagtcggatgtgaaatccccgggctcaacctgggaactgcattcgaaactggcaggcttgagtcttgtagaggggggtagaattccaggtgtagcggtgaaatgcgtagagatctggaggaataccggtggcgaaggcggccccctggacaaagactgacgctcaggtgcgaaagcgtggggagcaaacaggattagataccctggtagtccacgccgtaaacgatgtctacttggaggttgtgcccttgaggcgtggcttccggagctaacgcgttaagtagaccgcctggggagtacggccgcaaggttaaaactcaaatgaattgacgggggcccgcacaagcggtggagcatgtggtttaattcgatgcaacgcgaagaaccttacctggtcttgacatccacagaagaatccagagatggatttgtgccttcgggaactgtgagacaggtgctgcatggctgtcgtcagctcgtgttgtgaaatgttgggttaagtcccgcaacgagcgcaacccttatcctttgttgccagcggttaggccgggaactcaaaggagactgccagtgataaactggaggaaggtggggatgacgtcaagtcatcatggcccttacgaccagggctacacacgtgctacaatggcgcatacaaagagaagcgacctcgcgagagcaagcggacctcataaagtgcgtcgtagtccggattggagtctgcaactcgactccatgaagtcggaatcgctagtaatcgtggatcagaatgccacggtgaatacgttcccgggccttgtacacaccgcccgtcacaccatgggagtgggttgcaaaagaagtaggtagcttaaccttcgggagggcgcttaccactttgtgattcatgactggggtgaagtcgtaacaaggtaaccgtaggggaacctgcggttggatcacctccttaccttaaagaactgttctttgaagtgctcacacagattgtctgatgaaaagtaaaaagcaaggcgtcttgcgattgagacttcagtgtccccttcgtctagaggcccaggacaccgccctttcacggcggtaacaggggttcgaatcccctaggggacgccacttgcgcggtaatgtgtgaaaggcgttgccatcagtatctcaaaactgacttacgagtcacgtttgagatatttgctctttaaaaatctggatcaagctgaaaattgaaacacagaacaacgaaagttgttcgtgagtctctcaaattttcgcaacacgatgatgaatcgtaagaaacatcttcgggttgtgaggttaagcgactaagcgtacacggtggatgccctggcagtcagaggcgatgaagggcgtgctaatctgcgataagcgccggtaaggtgatatgaaccgttataaccggcgatacccgaatggggaaacccagtgtgattcgtcacactatcattaactgaatccataggttaatgaggcgaaccgggggaactgaaacatctaagtaccccgaggaaaagaaatcaaccgagattcccccagtagcggcgagcgaacggggaggagcccagagcctgaatcagcatgtgtgttagtggaagcgtctggaaaggcgcgcgatacagggtgacagccccgtacacaaaagcgcatgtgctgtgagctcgatgagtagggcgggacacgtggtatcctgtctgaatatggggggaccatcctccaaggctaaatactcctgactgaccgatagtgaaccagtaccgtgagggaaaggcgaaaagaaccccggcgaggggagtgaaaaagaacctgaaaccgtgtacgtacaagcagtgggagcacaggtttacctgtgtgactgcgtaccttttgtataatgggtcagcgacttatattctgtagcaaggttaaccgaataggggagccggagggaaaccgagtcttaattgggcgttaagttgcagggtatagacccgaaacccggtgatctagccatgggcaggttgaaggttgggtaacactaactggaggaccgaaccgactaatgttgaaaaattagcggatgacctgtggctgggggtgaaaggccaatcaaaccgggagatagctggttctccccgaaagctatttaggtagcgcctcgtgaattcatctccgggggtagagcactgtttcggctagggggccatcccggcttaccaacccgatgcaaactgcgaataccggagaatgttatcacgggagacacacggcgggtgctaacgtccgtcgtgaagagggaaacaacccagaccgccagctaaggtcccaaagtcatggttaagtgggaaacgatgtgggaaggcccagacagccaggatgttggcttagaagcagccatcatttaaagaaagcgtaatagctcactggtcgagtcggcctgcgcggaagatgtaacggggctaaaccatgcaccgaagctgcggcagcgacactgtgtgttgttgggtaggggagcgttctgtaagcctgtgaaggtgtgtcgtgaggcatgctggaggtatcagaagtgcgaatgctgacataagtaacgataaagcgggtgaaaagcccgctcgccggaagaccaagggttcctgtccaacgttaatcggggcagggtgagtcgacccctaaggcgaggccgaaaggcgtagtcgatgggaaacgggttaatattcccgtacttggtgttactgcgaaggggggacggagaaggctatgttggccgggcgacggttgtcccggtttaagcgtgtaggtgtgtgttccaggtaaatccggttcactttaacactgaggcgtgacgacgaggcactacggtgctgaagcaacaaatgccctgcttccaggaaaagcctctaagcatcaggtaacatcaaatcgtaccccaaaccgacacaggtggtcaggtagagaataccaaggcgcttgagagaactcgggtgaaggaactaggcaaaatggtgccgtaacttcgggagaaggcacgctgacacgtaggtgaagtgatttactcatggagctgaagtcagtcgaagataccagctggctgcaactgtttattaaaaacacagcactgtgcaaacacgaaagtggacgtatacggtgtgacgcctgcccggtgccggaaggttaattgatggggtcagcgcaagcgaagctcctgatcgaagccccggtaaacggcggccgtaactataacggtcctaaggtagcgaaattccttgtcgggtaagttccgacctgcacgaatggcgtaatgatggccaggctgtctccacccgagactcagtgaaattgaactcgctgtgaagatgcagtgtacccgcggcaagacggaaagaccccgtgaacctttactatagcttgacactgaacattgagccttgatgtgtaggataggtgggaggctttgaagtgtggacgccagtctgcatggagccgaccttgaaataccaccctttaatgtttgatgttctaacgtggacccgttacccgggttgcggacagtgtctggtgggtagtttgactggggcggtctcctcctaaagagtaacggaggagcacgaaggttggctaatcctggtcggacatcaggaggttagtgcaatggcataagccagcttgactgcgagcgtgacggcgcgagcaggtgcgaaagcaggtcatagtgatccggtggttctgaatggaagggccatcgctcaacggataaaaggtactccggggataacaggctgataccgcccaagagttcatatcgacggcggtgtttggcacctcgatgtcggctcatcacatcctggggctgaagtaggtcccaagggtatggctgttcgccatttaaagtggtacgcgagctgggtttagaacgtcgtgagacagttcggtccctatctgccgtgggcgctggagaactgaggggggctgctcctagtacgagaggaccggagtggacgcatcactggtgttcgggttgtcatgccaatggcactgcccggtagctaaatgcggaagagataagtgctgaaagcatctaagcacgaaacttgccccgagatgagttctccctgagacttagagtctcctgaaggaacgttgaagacgacgacgttgataggccgggtgtgtaagcgcagcgatgcgttgagctaaccggtactaatgaaccgtgaggcttaaccttacaacgccgaagatgttttggcggatgagagaagattttcagcactgattcagattacatcagaacgtaaaaacggtctgataacagaatttgcctggcggcagtagcgcggtggtcccacctgaccccatgccgaactcagaagtgaaacgccgtagcgccgatggtagtgtggggtctccccatgcgagagtagggaactgccaggcatcaaacaagtgaagaagcccgtccgtcaggacgggcttctttgcgtgtgtggtaacatttaaaaatgtaggcctgataagcgcagcgccatcaggcaacctgcaccgccggatggccgcttcgccttatccggcctacatgcacttatcagacagcgccgctactcacggataaattaaattcaacaatggatacggtttcccaagatcgtcgacctccgaacgtcccgtcaccttaaatcccattttcttataaaatccaacagcttgtgtattttgctcgttaacattggttgtcaaccccggcgccagtgttaacgcatgttcaactaatctcttaccgataccctgaccacgcacgtccggatcgacaaacagcgcatccatatgttcgccggtaagcagcataaatcctaccggctcatcctgatcggtcacggcaacccatagtggcgcttctggcagaaaatcgctcaccagttcttccagttcggcccgataagcgtttgacagaaaatcgtgcgtggtatcgactgagcgacgccagatcgcaatcagtttttccccttcctcatgccttgaacgacgaatgttaatcatcatcttcactccttttttgcttacttctattctaatgcaaatgctgtcgtgaaactttctcaccttgaacttgcagactcgacattcgcctgatttctgagtatcttcagctatctggatgtctaaacgtttaaacgtatgtcgtgaggttatcaggttatgccgattcgcgtgctggacgagctacccgccgtcaattttttacgtgaggagaatgtcttcgtcatgacgacttctcgcgcatcaggtcaggaaattcgcccgctaaaggtacttatccttaacctgatgccgaagaagattgaaacggaaaatcagtttctgcgcttgctatcgaactcgccattgcaggtcgatattcaactgctgcggatagatgcccgcgagtcgaggaacacgccagccgagcacctgaacaacttttactgtaacttcgacgatatctgcgatcagaactttgatgggcttatcgtgaccggagcgccgctgggtctggtggaatttaatgacgtggcttactggccgcagattaggcaggtgcttgaatgggcgaaagatcacgttacttcgacgctatttgtctgttgggccgttcaggccgcactcaatattctgtatggtatccctaagcagacccgtacagataaactttccggcgtctatgaacatcacatccttcatccacatgctctgttaacgcgtggttttgatgattcgtttcttgcgccacactcacgctatgccgatttcccggcggcgctgatacgggattatacggatcttgaaattctggccgaaacagaagaaggggatgcgtacctgtttgccagcaaagataaacgtattgcgtttgtcaccggtcatcctgaatatgacgctcatacgttagcgggtgaatattttcgtgacgttgaggccgggttaaatccggaggttccgtacaactatttcccaaaaaacgatccgcaaaacataccgcgcgcaacctggcgcagccacggtaatttactgtttactaactggctcaactattatgtctaccagattacgccatatgatctgcgtcacatgaatccaaccctggattaatcttctgcttctgacgatcctaaagcgtttcagcatgttgaatcaggcaccttcgggtgccttttttatttccgaaacgcacctcatcatgtaattaaatttaatttatattgttatcaataggttaatgcataattaaattaaaaatggaaattgtttttgattttgaaatttaattgagtagtcttagttgtgttgaacgaaaagcgcacagtgatccttcgttcgcattggggatgtatctggatcaacaacgaggagctgcatgatgaatccacaggcaaccacaactgatgaattaacctttaccaggccgcaaggcgagctggaaaagcaagtcctgaccgctgaagcagtcgagtttttgacggagttagtcacccgttttacgccaaaacgcaataaactcctggctgcacgtatccagcaacagcaggatattgataacggtaagttgcctgattttatttcggaaaccacttccattagagaaagtaattggcagattcgtggtattccggcggatttacaggatcgccgagtagaaattaccgggccggttgaacgtaaaatggtgattaatgccctgaacgcaaatgtgaaagtgtttatggcggattttgaagactcgctggcgccggactggaataaagttattgatggtcaaatcaacctgcgtgatgcggtgaacggcaccattagctataccaacgaagccggaaaaatctatcagctcaagcccgatccggccgtattgatttgtcgtgtacgtggtctacatctgccagaaaaacatgttacctggcggggggaagccattcccggcagcctgtttgattttgctctgtactttttccacaactataaagcgctgctcgctaaaggtagcggcccgtatttttacctgccgaaaacgcaagcctggcaggaggcagcctggtggagcgaagtcttcagctacgccgaagaccgctttaacctgccgcgcggtacgatcaaagcgaccctgttgattgaaacgcttcctgctgttttccagatggatgagattcttcatgcgttgcgtgatcatattgtcggtctcaactgtggtcgctgggattatattttcagctatatcaaaacgttgaaaaatcacccggatcgcgtcctgccggacaggcaggtggtaacgatggacaaaccgtttctgagcgcctactcgcgcctgctgatcaaaacctgtcacaagcgcggcgcgttcgcgatgggcggtatggcggcgtttatcccgagcaaagacgttgaacgcaacaatcaggtccttgccaaagtgaaagcggataaagcgctggaagcgaacaacggccacgacggcacgtggattgcgcatcctgggttggcggataccgcaatggccgtctttaacgaggtactgggcgagcacaaaaatcagctgttcattacccgtgatgaagatgcgccgattaccgctgaacagttactggagccatgtgaaggcgaacgcacagaagcgggaatgcgcgccaatattcgcgtggcagtgcagtacattgaagcgtggatctccggcaatggctgtgtaccgatttacggtctgatggaggatgccgcgacggcggaaatctcacgaacctctatctggcagtggattcaccatgagaaaacactgagcaatggaaaacccgtaacgaaagcgcttttccgcgaaatgttggcggaagagatgcgggtaatccaggacgaactgggcgagcaccgctacagcagcgggcgcttcgacgatgccgcacgtctgatggagcaaatcaccacctcagatgacttaatcgacttcctcaccctgccgggctatcgcttactggcttaattcaccacataacaatatggagcatctgcacatgaaaacccgtactcaacaaatcgaagaattacagaaagagtggacacaaccgcgctgggaaggcatcacccgcccgtacagcgcggaggaggtggtgaaattacgcggctcggttaacccggaatgcacgctggcgcagctcggcgcagcgaaaatttggcggctgttgcacggtgaagcgaaaaaaggctatatcaacagccttggcgcgctgactggcggtcaggcgttgcagcaggcgaaagccggtattgaggcgatttatctttcaggctggcaggtagcggcagatgccaacctggcatccagcatgtatccggatcaatcgttgtacccggcaaactctgttccggcggtagtggatcggatcaacaacacttttcgtcgtgcagatcagatccagtgggcatccggtattgaacccaatgatccgcgctatgtggattacttcctgccgatcgttgctgatgcggaagccggttttggcggcgttctgaatgccttcgaactgatgaaatcgatgattgaagccggtgcagcggccgttcacttcgaagatcagctggcgtcggtgaagaaatgcggccatatgggcggcaaggtgctggtccccacgcaggaagcgattcagaaactggttgctgcgcgtctggccgctgatgtgatgggtgtcccgacgctggtgattgcgcgtaccgatgcggatgcggcagatctgattacttccgactgcgatccctatgacagcggttttattaccggcgaacgcaccagcgaaggtttctaccgcacccatgcgggcattgagcaggcgatcagccgcggtctggcgtatgccccgtatgccgatctggtatggtgcgaaacttctacgccggatctcgaattggcgcgtcgttttgccgatgctatccacgcgaagtatccgggcaaactgctggcctataactgttcgccatccttcaactggcagaagaatctggacgacaagaccattgccagcttccagcagcagttgtcggacatgggttacaaataccagtttattaccctggcgggcatccacagcatgtggttcaacatgttcgacctggcgcatgcatacgcgcagggcgagggcatgaagcactatgttgagaaggttcaacaacccgagttcgccgcggcgaaagacggctacacctttgtttcccaccagcaggaagtgggtacaggttacttcgacaaagtcaccaccattattcagggcggcgcgtcatccgttaccgcgttaacaggatcgacggaagaatcgcagttttgattgatgcccggtggcgctgcgcttaccgggcctacagatagcgtaggccggataagcgaacgcgccatccggcatgacgtggtgccggatgagggaaaaaaatgccgcgtggcctggaattactgattgctcaaaccatcctgcaaggctttgacgcgcagtatggtcgatttctggaagtgacttccggcgcgcagcagcgttttgaacaggccgactggcacgccgtccaacaggcgatgaaaagccgtatccacctctatgatcatcatgtgggtctggtggtggagcaactgcgctgtattaccgatggcaaaagtaccgacgcggatttccttttacgcgttaaagagcattacacccggctgttgccggattacccgcgcttcgagattgcggagagctttttcaactccgtttattgccggttatttgaccaccgctcgttaacacccgagcggttgtttattttcagttcgcaaccggagcgccgctttcgtactatcccgcgcccgctggccaaagacttctttcccgatcacggttgggagccgctgttgatgcgcatactcagtgacttaccgctgcgtctgccctggcagaataaaagccgggatatccgctatattatcgcgcacctgactgaaacactgggcgaggacgcgctacctcgctgccatgtccaggtggcgaatgagttgttttaccgtaataaagcggcctggctggtaggtaaattaaccacacctgacggtacgctgccgtttttactgccgattcatcgcactgatgagggtgaactgtttgtcgatacctgcctgaccaccacggcagaagcgagcattgtgtttggttttgcccgctcttattttatggtgtatgcgccgctgcctgccgcgctggttgagtggttgcgtgaaatcctgccgggtaaaaccactgccgaactgtatatggcgattggctgccagaaacatgcgaaaaccgaaagctaccgcgaatatttatgttatctggctgaaagtgatgagaaattcattgaggcgcctggtatccgcggcatggtgatgctggtgtttaccctgccaggtttcgaccgggtatttaaaatcattaaagacaaattcgccccgcagaaagagatgtctgccgctcatgtgcgtgcctgttatcaactggtaaaagagcatgatcgcgtcggtcgtatggcggatacccaggagtttgagaatttcgtactggataaacggcaaattgatccggcgctgatggcgcttttacggcaagaagtgccagagaagattaccgatcttggggaacatatcgtcattcgccatctctatattgaacggcgcatggtgccgctcaatatctggctggaacaggtagaaggccagcagttgcgtgatgcgatagaagaatatggtaatgcgattcgccagcttgccgccgctaatattttccccggcgatatgttgtttaaaaactttggcgttacccgtcatggtcgcgtggtgttctacgactacgatgaaatttgctacatgacggaagtgaatttccgcgatattccgccagcgcgttatccggaagacgaactggccagcgaaccctggtatagcgtctcgccgggtgatgttttcccggaggagtttcgccactggctgtgtgccgatccgcgtatcgggccattgtttgaagagatgcatgccgacctgtttcgcgccgattactggcgcgcgctacagacgcgtattaaagaagggcatgtagaagatgtgtatgcctatcgacgtagacagcgctttagcgtgcgttacggcgcgatctcgagtacggcgaactcttcgtaaaccagttccatctccggcgaccaattaccctcgcgctcaaaaaaggcccggtgtgccgcttgccagtacgccaggctaagatcgccttcgccttccagtgcggcgagatcggcgctcatctcgttaaaacggatcagcctgagcgccagcgtgcgtatgacgcacacggcgtcgcctgtgccgttgagcacaatgtgatatgacccgggcgtgacagggggctgctctttctgatagctaaccagcgagctacaggtgccacgctttttaccggcgaccactagcgccgccagctcgtcggccagcgccggcgaatcaccgaaagaccaacagaaggcctgtgggtacttctcctgccagtataatttcaggctgctcatttcagcgagttccaccataggccagcgtcacctctttcgccgctttaatcaccatggcgccaagttcggtgacgcgatcgtcggtaatgcgtgagcaggggccggaaatagagagggccgcaaacggttcgcggtgttcgtcataaatacacgaggccacgcagcgcagaccgagcgcatgttcttcgtcgtcaaaggaatagccgcgcttgcgtgtttgggcgaggtcatctttcagatgcagcggcgacaccagcgtcgcatgggtataagcgtgcaaccccttgcggtgcagcagactggtaacctgttcctcactgagctgtgataaaaacgccttgcccgcgccagaggcgtgcatgggcagcttgccgccgatcggcgcggacatacgcatcagctgcgtacactgcacctgatcgataataatggcctgatggtcgctctggtcgagtacggcaaggtttaccgtttcgccggagtcctccatcagcttgcgcaaaatcggatggacaatcgccagcagattacggctctgtaagaagctgctgccgacgataaacgcgtgtgcgcctacggcccagtggcccagctcaccaacctggcggacaaaaccctgctgctgcatggtggtgagtagacggtgagtcgtggaattaggcaaacccgcctgttgcgccagttcggtcagcgcgacgctgccgttggactcggcaatccactccagcagcttcagaccgcgagttaatgactgaacctgcccggttacgggtgcagtggtagcggcaggttttctcccgcgtttcgcgggaacaggggcaaccatggcagactcctttttctgtatcgtggaaatcattttcgttttattcaattataatgcaagagttcctgaactgatcggatgagtgacatcacaggatgcccgatagcgctgcgcttatcaggcctacgctttgggagccgccaaagtaatttgtagactgataaggcgcttgcgccgccatccggcaaagcgacagaagtgggtggcaagctgaacatgtctcatgttgcccgttgttctcttttccgccagcacgctttgtgccagtatggctcgttacgtggagcgttgtcgggagcgagtgtgagcagcaaagttgaacaactgcgtgcgcagttaaatgaacgtattctggtgctggacggcggtatgggcaccatgatccagagctatcgtctacatgaagaagatttccgcggggagcgctttgccgactggccctgcgacctgaaaggcaacaatgacctgctggtactcagcaagccggaggtgatcgccgctatccacaacgcctactttgaggctggcgcggatatcatcgaaaccaacacctttaactcgacaaccattgcgatggcggattaccggatggaatccctgtcggcggaaatcaactatgcggcggccaaactggcgcgcgcctgcgccgatgaatggacggcgcgaacaccagaaaaaccacgttttgttgcgggcgtgcttggtccaactaaccgcacggcctccatttcgccggacgtcaacgacccggcgtttcgtaatatcaccttcgatcagctggtggcggcctaccgtgaatccaccaaagcgctggtggaaggcggggcggacctgatcctgattgaaaccgtctttgacaccctgaatgcgaaagcggcggtgtttgcggtgaaagaagagtttgaagcgctgggcgttgatctgccgatcatgatttccggcaccatcaccgacgcctctggtcgtaccctctccggccagacgaccgaagccttttataactcgctgcgccacgccgaggcgctcacttttggccttaactgcgcgctggggcctgatgagctgcgccagtacgtccaggaactgtcgcggattgccgaatgctacgtcaccgcgcacccgaacgccggcctgccgaacgctttcggcgagtacgacctcgacgccgacaccatggcgaaacagattcgcgaatgggcggaagcgggcttcctgaatatcgttggcggctgctgtggcactacgccggagcatatcgccgccatgagccgcgccgttgccggtttgctgccgcgccagctgccggatatcccggtcgcctgccgcctttccggcctggagccgctgaacattggtgacgatagcctgtttgtgaacgtcggcgaacgtactaacgtcaccggctcggccaaatttaaacggctgatcaaagaagagaaatacagcgaagcgctggatgtcgcccgtcagcaggtagaaagcggcgcgcagattattgatatcaatatggatgaggggatgctcgacgccgaagcggcgatggtgcgtttcctcagcctgattgccggtgagccggacattgcccgtgtaccaatcatgatcgactcctccaaatgggaggttatcgaaaaagggctgaagtgcattcagggtaaaggcatcgtcaactctatttcgatgaaagagggcgtggaagcctttattcatcatgcgaagttgctacgtcgctatggcgccgcagtggtggtgatggcctttgatgagcaggggcaggccgatacccgcgcgcgtaaaatcgaaatttgccgccgagcctacaaaattctcaccgaagaggtgggtttcccgccggaagacatcatcttcgacccgaatatcttcgccgtggcgaccggtattgaagagcacaacaactacgcgcaggactttatcggcgcttgcgaagacatcaaacgcgagctgccgcacgcgctgatctccggcggcgtgtctaacgtgtccttctcgttccgcggcaacgacccggtacgtgaggctatccacgcggtattcctctactacgccatccgcaatggcatggacatgggcatcgtcaacgccgggcaactggcgatttatgacgacctgcctgccgaactgcgcgatgcagttgaagatgtcattcttaaccgtcgcgatgacggcaccgagcgtttgctggatttggcggagaaataccgcggcagcaaaaccgacgaagctgccaacgcccagcaggcggaatggcgtagctgggacgtgaaaaagcgtctcgaatactcgctggtgaaaggcatcaccgaatttatcgaacaggataccgaagaagcccgtcagcaggccgcccgcccgattgaggtgattgaagggccgttgatggacggcatgaacgtggtcggcgacctgttcggcgaagggaaaatgttcctgccgcaggtggtgaaatccgctcgcgtgatgaaacaagcggtggcctacctggagccgtttattgaagccagcaaagaaaaaggctccagcaacggcaagatggtgatcgccaccgtgaagggcgatgtgcacgatattggtaaaaatatcgttggcgtggtgctgcaatgtaacaactacgaaatcgtcgatcttggcgtgatggtgccagcggagaaaatcctcagaacggcgcgtgaagtgaatgccgatctgatcggtctttccgggcttatcaccccgtcgctggacgaaatggtcaacgtggcgaaagagatggagcgtcagggctttactatcccgctactgatcggcggcgcaaccacttcgaaagcgcatacggcggtgaaaatcgagcagaactacagcggtccgacggtctacgtgcagaatgcttcgcgtaccgtgggcgtggtggcggcgctactctccgacaaccagcgcgatgactttgtcgcccgtacccgcaaagagtacgaaaccgtgcgtattcagcacgcccgcaaaaaaccgcgtacgccgccggtcacgctggaagcggcgcgcgataatgatctggcattcgattgggaacgctacaccccgccggtagcccaccgtctgggcgtgcagggggtggaagccagcatcgaaactctgcgcaactacatcgactggacgccgttctttatgacctggtcgctggccggcaaatacccgcgcattctggaagatgaggtggtgggcgttgaggcgcagcgtctgtttaaagacgccaatgatatgctggataaactcagcgccgagaagctgttgaatccgcgtggcgtggtgggcctgttcccggctaaccgtgtgggtgacgacatcgaaatctatcgcgacgcaacccgtactcatgttctgacggtcagccaccacctgcgccagcagaccgagaaagtcggttttgccaactactgtctggcggattttgtcgcgccgaaactgagcggcaaagcggattacatcggtgctttcgcggtgaccggcggtctggaggaggatgcgctggcggacgccttcgaagcgcaacacgacgactataacaagatcatggtgaaagcgattgccgaccgtctggcggaagcgtttgccgagtatctgcatgagcgtgtacgtaaggtttactggggatatgcgccgaacgagagcctgagtaacgacgaattaatccgcgaaaactaccaggggattcgcccggcgccgggttatcctgcctgcccggaacataccgaaaaaggcactatctggcagctactggatgtcgaaaaacacaccgggatgaagctcaccgaatctttcgccatgtggcctggcgcgtcggtctccggctggtacttcagccatcctgagagcaaatacttcgcggtagcgcagatccaacgcgatcaggtgacagattatgctttccgtaaaggaatgagcgttgaggacgttgagcggtggctggcgccgaacctggggtacgatgcggactgattcataaaatcgtcacttttccttacaacatacaaggcactcattgggtgccttgtctctttcttacaattaaacccttatactgaaggaaggctctacgctgaatttgccggatggcggcgtaaacgccttatccagcataccgtattacgtatggtaagcccggtggcgtgcaacgccagcaggccttaacgctgtgcgccatcaggcaatttatcgcaagtgagcttcaggaaaacgtataacgataaggagaacctgacgccgtgttaactttgctccatctactttctgccgttgcgctgttggtatggggaacacatatcgttcgtactggcgtaatgcgcgtgtttggcgcgcgtctacgcactgtcctcagccgcagcgtggaaaagaaaccgctcgccttttgtgcgggtatcggtgttaccgcgctggtacaaagcagtaacgccaccactttattggtaacgtcgtttgtcgcccaggatcttgtcgccctgacgccagctctggtgattgtgctgggcgctgatgtgggtactgcgctaatggcgcgtattctcacctttgacttgtcgtggctatcgccgctgctgatttttattggcgtgattttctttttgggacgtaagcagtcccgcgccgggcagctgggtcgcgtcggtatcgggcttggcctgattctactggcgctggagctgattgtgcaggcagtgacgccgatcactcaggctaatggcgtgcaggtcattttcgcgtcgctgacgggcgacattatgctggatgcgctgattggcgcgatgttcgctattatcagttattccagcctggcggcggtgttgctgacggcgaccctgacggcggcggggattatatcgttcccggtggcgttgtgcctggtcatcggcgccaatctgggatcgggcttgttggcgatgctcaacaacagcgccgccaatgctgccgcgcgtcgcgtagcgctcggcagcctattgttcaaattgatcggcagcctggtcatcctgccgtttgtccatccgctggcgaatctgatggatgagctatcgctaccgaagtcagagctggtgatctatttccacgttttctataacctggtgcgctgcctggcgatggtgccatttgccgagctgatggcgcgtttttgtaaacgaattattcgtgatgagcctgaactggatacccatctgaagccgaaacatctggatgtcagcgcgctggatacgccaacgctggcgctggctaatgctgcccgtgaggtgttgcgcattggcgatgcgatggaacagatgatggaagggctaaaaaaggtcatgcacggcgagccgcgtgaagagaaagcgctgcgcaagctggcggatgacgttaacgtgctctacaccgcgattaagctttatctggcgcgaatgccgaaagacgagctggcggcggaggagtcccgtcggtgggcggagattattgagatggccctgaacctcgaacaggcgtcggatattatcgagcgaatgggcagcgagattgccgacaagtcgctggcggcgcgtcgggcattttcagaagaaggattgaaagagctggatgcgctttacgatcaactgctcagtaatctgcaactggcgatgtcggtctttttctccggcgatgtcaccagcgcccgtcggttgcgccgcagtaaacatcgcttccgtatacttaatcgccgatactcacatgcgcatgtcgaccgcctgcaccagcagaacgtgcaaagcattgaaaccagctcgctccatttagggctgctgggcgatatgaagcgtcttaactcactgttctgttcggtcgcctatagcgtactggaacagccggatcaggacgaggaacggggcgagtattaagtgaaatgccggatggcggggcctacggagaacatgcgtgtaggcccgtcattcggcattcaatgtggccagggattaaaagcgatgaccgcttccagcgccacggcctcttcgcccgctttaaacacccaggtggtattcgggccgccgagaaccgcctggccgttgctcacctgaatccagttaccttccggcaaaccaatcactgtcagttccggcgcgaccaccagcagttcgcgaatacgctgctcgcgggtctcgcccttatgaccttccggcaaggcgttagtgaagtgaggattaatttgcagcgggaacagatccagcgcgtcgaaaccgtttggatcgacgatcggcatatcgttggtcgtgcggatagtcgggcaggcaaggttggcgcccgcgctccagccgatatacagcgcgccgcgttttaccctgtccgccatcggcgccagcagcccgcgttcacgcgattctttcagtagctgaaaggtatttccgccgccgacaataatgatttccgctttctcaatcgctgcaagcggatcggcgacacgatgaatccctgtgacgtttatccctaatggcgcaagtacctctgcggttttatccgtgtactcgtcccatgtttgcgtgacgccggcaaacggaataaacacggctgagcgtcgaccgttcaattgattcgctatcagcggcagagcgtgttccagctaggctttacccggcagcgtcgagttacttaataaaagcagttccattacttctccacctcatcaggaaatgtcaaaacgtaataatgctaccattatccatttaatgtcttactgatatggctcatgatgttgcgcgtgttacaggcaacgcgcggtcgctaaaagtgacgccaggccagatctgctatctggtatcgcctgaaaaattacaggtataatccgcaaaattatttaacacgtttagagacgaaaatggcaaaactgaccttacaagagcaactgctacaagcgggattagtgaccagcaaaaaaatggccaaagtccagcgcacggctaaaaaatcacgcgttcaggctcgtgaggccagagaggcggtggaaaaaaataaaaaggcgcaacttgagcgtgataaacaactcagtgaacagcaaaaacaagcggttttagcgaaagagtttaaagctcaggttaagcaacttattgaaatgaatagaatcaatgtatctaaaggcgatattggttttaacttcaccgataataacgtcatcaaaaaaatagacgtggataagctcactcagacgcaactgattaatgggcgtctcgcgattgcgcgtctggttatcaataacagcggtgaatgtgaatatgcgattattcccgcgagcgtcgccgataaaatcgcacaacgagatgcggacagtattgtcgtaaacagtgcgctgagtcaggaagagcaggacgaagatgatccgtatgccgattttaaagttcccgacgatttgatgtggtaagtcacattcccgacgtttatgtagaaaaatttctcagagagtaaatatgctgaccgacacatctatccggcttaataaatatatcagtgaaagcggcatctgttcgcgtcgcgaggcggaccgttttatcgaacagggcaatgtctttatcaacggcaaacgcgccgccattggcgatcaggtagtcgccggggatgttgttaaagtaaatggtcggttgattgagccgcgagaagcggatgatttagtgctgattgcgctgaataaaccggttggcattgtcagtaccactgaagacggcgaacgcgacaatattgtcgattttgtgaaccacagcaaacgtatcttcccgattggtcgtctggataaagactcgcaggggctgatatttctgactaaccacggcgatctggtcaataagattctgcgtgccggtaacgatcacgaaaaagagtatctggtgacggtggataaaccgattaccgacgagtttattcgtggtatgggcgctggcgtgccgattctgggtactgtcaccaaaaaatgtaaggtgaaaaaagaggcgccgtttgtctttcgcattaccctggtgcagggattaaaccgtcagatccgtcgtatgtgtgaatactttggttatgaagtgacgaaactggagcgtacgcgcattatgaacgtcagcctgagcgggattccgctgggcgagtggcgcgatctgacggacgatgagctgatcgatctgtttaaattgattgagcgttcctcttccgaagccaaaccaaaggccaaagcgaagccgaagaccacgggtattaagcgaccggttattgcgatcgaaaaaagcaatgagaaagcgcgcccggcatcaagcggtaagcgctttacctcgccgggacgaaagaagaaaggacgttaacgtctgccgcgcgtcggcgtattcgccgaccaggagaatgacgcttccgtatcgggtttatacgcctgctttttcttcaactggcgggcttttttcgcttcagcctcacgcagcgccatcagcttatcgatgtactccttttttacgctgttggtctcagaattggtcagcggacgaccgtgcgcaatacgggcgcggtccagcaacgttttcagttcgcgctgttcgcgctcggtcatctctttttgggtaatgcgggggagtgccatacgggtgccctcagttagccgatgcatttagtctacggcaatacgctacgggcggatagcgctcagtcagcaatccgcagctttccggcgaaatcctgtggcgtataacccgttgacgtaaatcctttatccgtgatgatgttatcgatttcttttacgcttgcgatgcacatcacaccgtcctgaccaaatttggtatggtcggcgagaatcactgattttttgctcatcgcaatcatggctttggcaacgtaggcttcttcaaagctcttcaccaacacgccatgctggggagaaatgccgccagcgccaataaaacagatatccgcgtgaattgcgttaatctgctgacacaccgagacgccgaggttggcgcgaaaatggtaatcatattcgccgcctaatacatacacgcgggcctgcaggttatgctctttaattttatcggcaatcagggctgaattggtaatcacggaaaaagcgagaggcggtaattgctcggccagaataaggttagttgtacaggagtcaataaacaatgtatcccgttcactgaccatttcggcggcaagtttgccaatcgctattttctcttcgcgatgcgcctctattcttgcgctaaacgcatcctcctggacaacttgctttttgactgcgcccccatgaatcttagtgattttgccttctgattccagtaaggagagatcgcgacgaatggtttccgaggtgacgttgagcatttccgataatttaataacggtgacttcaccgaatttgtttaattcatcaagaatatgttttcgtcttttaattggattcattatctttcgccgccgtcaacctttggcgcatggtaactggatgcgtaaggcaacgcaaccactccaacgcatggacgataccctcctcatcattcgtggcagtcacatagccggcctgccgctttactgcatccggcgcgttgcccattgcgatgctgattccggcggcggcaaacatgctgacatcattctgctgatcgccaatcgcgaccaccttgtcagaagatatatttaaataatgaattaattgttctattatgcaccctttatttatatcggatctttgaatatcaatataattctctcccgtgacaaccgcataatatccacaaggcaggtgattattcacttctgtacacagattatctatctccggagatgcggcaacaagtgtaattttatatatgttgcgacgattaaagatattttctgcagtttcagttataagcggtaatccaaataagcgagcctcatatgttgtccagtgcgcaatcagtctatcgtcacgatggtgaattgcttcggcactaaaaaaatggtggtgatagcgggaaagagaaatatgctggtcaatattccacaggtctgtggcggtcagaggggcagcatgaataatgcgctgtcccgccatctccagaaggtgtccgcagttaaaaccggcgcaccagctaaacaacctatcaacctgttgttggcgtagcaggcgtaccattgaggagaccggtctggcggaacatgccgccagtagaccaccgtcctggcggaacgcaatcagcgcctgacgcgtgcgcgggctgattgttttctgcgaggtgagtaatgttccatccagatcggtgattaacaacatctctcgttccctgatatcaatgaacaataaacggcgtaacggcttctttggcggcgttgcacaccatgttgtcgatagccgtaccgaccaccagaatattgactccggtatctttaaacgctttcgcgttggcgaggttaatcccgccttccgccagcgtcggaacatccaccgcgccgaccaacgcccgcaggcgatctttaatcatctgcgggatatcgcctgccgctacgccttcatagctcatgccggtcatcagaccaatcatatccacgccgatatcctgcatccgcttcgccacgctggcgacctcttccggcgtgcgtgcaggaataccgaaagtatgcagatcgtcaggatggccaatataggcatcgacggtcagaccatattgatgggcgagattaacgatgtcctgcagatcgtcccagtcggatttatgcgtatgtaaaccgtcggctccagcgcgggcaatctccagaatttccgtttcgctgagcggcaccggtaaggtttcggtaaaaccgccggcgataccaacggtgataaaaatatcgtccgggaccacattacgcacaccgtgtacggcctcagccatctggctgttggtgatttcgtgacgaatctgctccgccgcgtgcatgttgctcacgcctttgtgtccacgcgccagcgccaacgcagggtggttcggctccagaagcttaacgccagcctcacacacggctttcgccaggcgcgcatcgtcgccagttattcctgtgctgaggatagtttgcccaccgtgaagcgtgatggcttctttcactttctgtaacgctttggcgcgttttttattcatatcgcctttaaacatggtgtacctctggtgttggtgcattaattaacggctgtcgttgttgattcgctctgtacgacaggtttgaaacggttagcaataatggtggtaaggcaggtcatagccattgtggcaatcattacgatggccatctggagcgcattgctggataagaacggtgaggcgaaagccggaacataggccacgcctttgacgttaaaaaagcccagcatcatgccgcccattccggcccaaaaaatggcggagccaaaaacaattttgttggcgaacatgaagggataggcggattcaacaaaggtgccaaaacccaggttaatgagcaggcccggcgtagcaacggcagcttcgcttttttcacgcggggcgatcacattggcaaggttaatacctgcggccaccatcaccagaccgaccatatcgaccgcgccgaggaagctgacgccggatttttccatctccagcagcaccaacggcaggatcaccgcgtgatagacgccgccgagaatggcaggccagataaccagaccagccagcagcccggcaagaattgggctgaatgccagcgtgctttcgatagccagtttgatgtaattacccgcagatagcgccagcggactcagcagatagtgcatgactaacccagcggcaaggcccgatatcccaccggcgacgatgttgacggtagtcattgggaagcgccagttcaggcacagctcgaacagccaacggacgaaaatccccgccattacaccgccgataatgccgccgatcagtccgccctctacggaaagcacgccagcgacgaccccggccacaattgaaacttcatccagttcggaaatctgttttgccgccagtaccgcgactaacactggcagaccttttaataagatttcaaagatatcgttaagtttttccagtcctggtatgtggctcagggcgagtacaatcgccatggcgataaagcctggtagagcagggatcatgatgctacgaatgttaaaacgtttgagcaggctttttccggaaccgctctgcgagggcgaagcgctacccaactgtggtttgtacttgataccccaatgtttacacagcgacgccacgaaggagacggcgcgggtacggctggtggtgccagttgttccggaggtcgcgaccacattcgccccctttgccgccaccagcgccatggaggttcccccggtgccgacaatcggtgttttcatctcaacggcggcggcaaaaacggcctggttcgcctttaccggatcagcgctcattaccacgatcccatcgatctcaccgcggcggatcatctcagcgatttggcgatcgctttctactaccgaggtgtttacctccgaaagtttgccctgaaatatgcgctgtggtttttgttggttttctgtggttaatgcataaaccgatgccggggtatccggtttggcgacgtccatcgaggcttctgccgcgataaactgtacggcggccacattcacgcccgcagcctcacactgctgataaatttcctggagtaacttctctggctcggcgccacccaggttgtagaggttgcctccactgcttccaataatcgcaatttttttcatagcggcctcaaatagggtaagggggttatctgtgttgtagtgcaatcataattccaactaaaacaaaataaagcaacaatgaaaaggtggttttataccaaatgatctcaattttcaaatgtaactaactaaaatataatgattaatttgtatttttgctttatgttgtttcgtgtggttttgtgacgaggttcaaaatgaggagtgcataaataggggaaagctgcccatgttgatgggacgagtagggtgttgcggattcctgagcagtattccgccggcagcgcctggcgcgggaaccgccggatgacgcgcctgcgtcgccatccggcaacgcatcgcccgatggcgcttacgctaccgtattagaaacatatagaggttctggtggcgcaaagaaaagcgccggcattgaagagaaggaagctttaacgcagtgataacttatattgtttcactttgctttggattgtgttttttaaactaaaataaggcacccaaggcaatgctgtgttccaggggcgaggggaaccatgaaaacagactatgcttactccgtcaggtaattttccattacctgtcccatcgtatagttcagggttaaaaccaatcatttttggtgttgctatattagctttgtaactaataattcttccgggtaagatgttttgccatctttcagcatcttgacatattctgccgataaatccttgatcgccatgatagggcggggttcttatggcattgatttccttttcaggatttttcataaattcatcccacacatttttttttgcgggtgcaggaataaacataatacctgttgctggcgcaactgaagcaccatgctgagaaaagtcattaagtaatgttatttttttcatagttgtcagaggagtaatatctcccacaacaacgctatctatatcaatatagagaatatcctcattaccaagaacaggatgcagtggattgaaaagttctagttttgcccaccatcctggccaatcatacaaaagaggcgctgtatttaccccttttatctttagcgcatctgttaaacaaacagaatcataacctttgagctgcttatgtaaccattgagcatgttttgtggtgaagtctttgctttgtctgagcacagaaacaataatcattatattccccggtgaatattaggtgtttttagccatgttccactatatttaatgtgctttatattgcaacaaaattagtgttcatatggttattgaagtttaattacattcaagatgtgaatgtaattaatttgtttataatgttattaatatatgtaatgtaagttgataaatgttttaatgattgttttgtcttttatatttccatggggagatataaaataagagttgggatgggagtgatcttatttcccctttttgtttctggtggtttttatgttgctgaattggattaaacacttcagtgtttaaagcgcgaggtccgcagtatttttatccatcttctcaggcaaccgggaggcaggtatcccggagttggacagactgcagtgatgttacgagaacgatgcccgatagcgtttacgctaccgggccttactaaacgctctatcagaatagtgatgtagacatcaggtcagagaatgaacataaaaatcattcacaaaagaaatgttttatttttagtctattaacctgacgagaaaagtctataaaatattgcaatcttaagatttagattaatcccattttttgtgatttattactgggattacttctgatgttttttttgtaatatatatgctatttgctggaatgctcttatttacaaatgacattgctccaatagtaacattatcaccgatagtaatagagcctataatgcaggtgttggctcctatatctacattattgccaataataatgaaatcatcttcttttaaaccttgcttgttccctactgttgtattttgcttaagcgataaattacaaccgatacgagcctttttcgtgatgacgatccccatgtgatgcggaatatccaaaccatagccgattactgctcccagctctatatcaattccaaatttggaatttagtttgcgattaatccataatccagtttttttctgtttttttgaactatagatatacatctcatttgccagacgccaccaaaataaaaattacgtcggcgattgttattggcctgcataagtaatcgacataatgaaaattcattcctgcgaataatctcatgccgccagtattcccgtaatccacttccttttttagatatggaaaataataagcaatgtaagagtttgattttttcttcctccaatgaagaaagctagcttgttaaataaatgttattatcgtaggaggttcacgtatcaattggtaaaaatactataagatggttttttataatacttcatttgctatgcaaactgaacattcttttaatttataattaaatgccgttgatagtaaatatttatatatattttgaatgtattgatgggtagttatttcaccgttttttacgcttccctttttggtgccgtcacggggagcatggtgctggatatggagataaaatatgattcagaaatcaaaagaaatggttcggcttccggagattattaacgatctggcgtttcatgcgtcgcaggtacttattgaaagcatgaatattgatagcgcgtcagccgaaaatgccggtcaggcaattgctgacagaatgatgcgcaactggggcgggcaaagcatttatttccccaaaggtatctctggtcgagcctcggagcgggattatcagatttacagcgagtgcgatgggcgtaattatgcggagctggccaaaaagtacaatttgacactgcagtggatctataaaatcgttaagcgggtccacacggaaaaacagcaccagcggcgtatgctgtaagcgatatcgggtatggcgtatagcgacaagcgctatacgccgggagctgcgacaggccggataaggcgcttgcgtcgccatccggcagcgtattgcctgatagcgctcacccgctgtcgtgtcagggcgattattcaaataagttctgatgtagcttttgcaccactttctcggcatcgtctcccggcacgaggaagcacagattgtggctggaggcgccgtaacaaatcatgcgaatgttgaacggttccaggacgccaaacacttctttaccaacaccgcaggcttttgacaggttgttgccaatcagcgcgaccagcgccagtccttcttcgacttcgacccgacacagcgcggaaagctccatcaataaggattgggtcagtaacgtatcgcccgtggaggtggagccggtagtatccagcgtcagcgcaacgctcacctccgaagtggtaatcagatctaccgaaatattatgccgcgccagaatgccgaacacctctgccaggaaacctcgtgagtgcagcatattcaggctgtgcagcgtcaatagcgtttgattgcggcgcagcgccagcgcgcggaacagcggcgggttttgggttttattgcacaccagcgtaccgcccgcttgcggatctttactggagccaacgaagaccgggatatcgctgcgcacggccgggagtaaggtggctggatgcagtacttttgcgccgaaggttgccatctccgccgcttcttcaaagtcgatttcatcaattcgctgcgcgacgggcactacgcgcgggtcggtggtgtaaataccgggcacatctgtccagatatcaactcgcgcggcatggagcgcttcagccagcaacgctgccgtatagtcgctgccgccgcggcctaatgtcgtggtgcggcctttgctttcactgccgataaagccctgagtaatgaccaacgtttcgctcaggcgcgggagcaactgctgcgcggccagttccgcaagcgctgcgacgtccggttccgcacgaccaaagcgatcgctggtacgcatcactttgcgcacgtcgaaccagtgggcctgtacgtcgcgttcacgcaggatctcaacaaatagcagggtagacatcagctcgccgtggctgaccagttcatcggtcagggctgccgatgtcgccagcgatgccgcctccgccagaatagtgatgttttccagcaggcgttcaatctcttcgcgaatgacattcggatgacgcagacgatcaaggatatcgaactggattttacggatggcgtcgagcgtagcgaaacgttcgccgggctccatcccttcggccagcgccaccagcagattagtgatgccggcagacgcggaaagcacgactaaacgaacattggcgtcggaaagtacgatatccgcgctacggttcatggcgtcaaaatcagcgacgctggtaccgccaaatttggaaacaacgatctctgtcatatcaacctcgtgtcaggaaatgaaaaacgcgaccatggcacaagggcagaacagaaaccggtgcaggcgcaaatgcaagtaacgtatttataaataaaagttgtggcctggactgtcaacgttgggattatgcggattttttatgctgagtttaggctcagtaacagcgcttataaccccgatacccgtttgtagtatgttggcttatctatgcgcccggcgactcacccacttgccgcctttctgcacctcgaattatttagggtatatactttttatcctcattcgacagtgcctggggcaacggcactaaaacaatcacacttttctgtgactggcgttacaatcgatcccagtcacaattctcaaatcagaagagtattgctaatgaaaaacatcaatccaacgcagacttctgcctggcaggcgctccagaaacactacgatgaaatgaaagacgttacgatcgctgagcttttcgcgaacgatagcgaccgtttcgctaaattttccgcgacgtttgacgatctgatgctggtggatttctccaaaaaccgcatcaccgaagagacgctggcaaaattacaggatctggcgaaagagaccgatctggccggcgcgattaaatccatgttctccggcgagaagatcaaccgcaccgaagaccgcgccgtgctgcacgtggcgctgcgtaaccgtagcaatacgccgatcattgtggacggcaaagatgtgatgccggaagtgaacgccgtgcttgagaaaatgaaaactttctcgcaagcgattatctccggtcagtggaaaggctacaccggtaaggccatcaccgacgtggtgaacatcggtatcggcggttccgacctcggcccgttcatggtgaccgaagcgctgcgtccgtataaaaatcatctgactatgcacttcgtctctaacgttgatggcacccacatcgctgaagtgctgaaaaaagtgaacccggaaaccacgctgttcctggtcgcttctaaaactttcaccacccaggaaaccatgaccaacgcccacagcgcgcgcgactggttcctgaaaactgcaggcgatgaaaaacacgtggcgaaacactttgctgcgctctccaccaacgccaaagcggtcggcgaatttggtatcgacacggccaatatgttcgagttctgggactgggtcggcggtcgttactcgctgtggtctgccatcgggctgtccattattctgtccgtcggtttcgacaactttgtcgagctgctttccggcgcgcacgcgatggacaagcatttctccaccactccggcggagaaaaacctacccattctgctggcgttgattggcatctggtacaacaatttcttcggcgcggaaaccgaagccattctgccgtacgaccagtatatgcaccgtttcgccgcctacttccagcagggtaacatggaatccaacggtaaatacgttgaccgtaacggcaacgccgtggattaccagacaggcccaattatctggggcgaaccaggcaccaacggtcagcacgcgttttatcaattgattcaccagggtactaaaatggtgccgtgtgactttatcgccccggctatcacccataacccgctatccgatcatcatcagaagctgctgtctaacttcttcgcgcagaccgaagcgctggcgtttggtaaatcccgcgaggtggttgagcaggaatatcgcgatcagggtaaagatccggcgcagctcgaacacgttgtgccattcaaagtgtttgaaggcaaccgcccgaccaactctatcctgctgcgtgaaattacaccgttcagcctgggcgcgctgattgcgctgtatgagcataaaatctttacgcagggcgccatcctgaacatctttactttcgaccagtggggcgttgagttgggtaaacagttggctaaccgtattctgccggagctgggcgatgataaagctatttcgtcccatgatagctctaccaacggtctgattaaccgttataaagcctggcgcgcctgatggcgctgcgcttatccggtctacgtaatgcatagcgtctgtgggccggataaggcgtttcgccgccatccggcaaaaagagaataagataataaaaaggccgatattcacatcggctttttttataagataattccgcttgtccgtctttacccccacaattttatattgagcttaatcctaaaataagcaataaccagaaaatcactctgcgttattttcagattatacggatgcctttgtgtttttatttaattctaacttattgatttgatttacttattaattaaatagaggatgtgttgtttctttaaagtttaattatcctaaaacctcgctgttatttctcccggacataatccgcctgctttggttgtgtatactcggtagcgcccgaaattcttttgggtaaatctccattcattcaatgaagggaaattatgatgaaaaaagtactgtatggcatttttgccataaccgcgcttgcggcgacatctgtctcggcagcccccgttcaggtgggtgaagcggcagggtcggcagcgacgtcggtatcggcgggaagctcctccgctaccagcgttagcaccgtaagttcggcggtgggcgtcgcgttagcggcaaccggcggcggcgatggttccaataccgggaccacgaccaccacgaccaccagtacccagtagtatcggtacgtttaaccataaccacactccggtgtggttattttgcccctctggagaagcgtcgtgaagcgactcgcacttatcctgatttgcctgctattacaggcgtgttcggccaccactaaaggcctgggcgattcactgtgggacagtttgttcggtacgccaggcgtacagctaacggatgacgatattcaaaacatgccgtatgccagccagtacatgcagcttaacggcggccctcaactgtttgtggtgctcgctttctcggaaaacgggcagcagaaatgggtgacgcaggatggcgcgacgatcgtgacgcagcatggccgtctggtcaaaactctgctcagcggtgacaacctgatcgatgtgaataatctggcggccgacccgctggcgaaaccaggacagattatcgatggcgcgacctggactcgcaccctgggctggaccgaacatcgccaggtgcgttacgccaccgcccgctccgtttttacatggcgagggaccgatagcgtgaacgtcggcagtgaagagaccgccgtgcgggtgttagatgaagaagtgacgaccgatcaaacgcgctggcgtaatcgctactgggttgatagtgaaggccaaattcgccagacggaacagtatctgggcgcgaattactttccggtgaaaaccacgctgattaaggcggcaaaatcatgatgaaaaggatgataagcgcgctggcactggcctttatcgcgtcatccgtctttgccagcggcactgttaccgtttttacccaaggtaatagcgagcctaaaacgctgacagacgctgaacgtctgctcgatttagtcggacagccgcgcctggcaacgagctggtggcctgcggcggtgataggcgaagaacaggcgaccgtgacggcgcgtcagcagcagcaggaacttctcgggcgactggcggcgctcggcgctgaggaagatggcgatgcggcggcggcgataaacacactacgccgacagattcaggcggtgaaggtgacgggcagacaattagtgaaccttgatcctgacgtggttcgggtgagcgaacgaggtaacccgccgctgcaaggtcactacacgctctgggtcgggccgcaacccacgcaggtgacgctctttggcttgattagccagccgggcagccagccgttcgtccctgggcgggacgtcgccagttatcttgagggtcagcgcttactcagcggcgcggatcgtagctatgcctgggtggtttaccctgatggacgcagccaaaaagcgccggtggcttactggaataaacgtcatatcgagccaatgcccggcagcattatttttgtcggttttgccgattccctttggcgcggcacgccgaaggcgataaatgccgacattcttcataccctgacgcagcggataccggaataatgaaaaaaacacatctgctcagcgtgctggcgctgggtattagcgcggcctgccatgccgaaacatatccagcccctgttgggccttcacaatctgactttggcggcgtgggcctgctgcaaacgccgacagcgcgtatggcgcgtgaaggggagatgagcctgaactatcgtgataacgatcagtaccgctactactcggcttcggttcagcttttcccgtggctggaaaccacgttgcgctataccgatgtccgtacgaaaaagtacagcagcgtggaatcattctccggcgaccagacttacaaagataaagcgtttgatgtgaaactgcggttgtgggaagagagttactggatgccgcaggtggcggttggcgcgcgcgatatcggcgggacggggctgtttgatgcggaatatattgtagcgagtaaggcctgggggccgtttgatttttcattaggtctcggctggggctatcttggcaccagcggcaatgtgtctaatcctttctgttcgtatagtgataaattctgttcgcgtgataacagttataaagaggccggttccgtcgacggtagcgatatgtttcacggcccggcctcgctgtttggcggcgtggaataccagaccccgtggcaaccgctacgcctgaagctggagtatgaaggcaataactatcagcaggattttgcgggtaaactggagcagaagagcaagtttaacgtcggcgccatttaccgcgtcaccgattgggccgacgttaacctcagctacgagcgcggcaacacctttatgtttggcgttacgctgcgcaccaatttcaacgatttacgtcccgcgtatcatgacaattcacgcccgcaataccgaccacagccgcaggatgccatcctgcaacattcggtagtggctaatcaattaacgttattgaaatataatgccggtctggcggacccgaaaatccaggtcaaaggcgatacgctatacgttaccggtgaacaggtgaagtaccgcgactcccgtgaagggatcgtgcgcgctaaccggatcgtcatgaacgatctgccggaggggatccgcacgatccgcgtgacggaaaaccgccttaatctgccgcaggtcaccactgaaaccgatgtcgccagcctgaaacgccatctggaaggcgaaccgctgggacatgaaactccgctggcgcaaaaacgcgtggagccgatcgtgccagagagtactgaacagggttggtatatcgacaagtcgcgcgttgattttcatcttgatcccgtgctgaatcagtcggtaggcggcccggaaaacttctatatgtatcagttgggcgtaatgggaaccgcggatctgtgggtcacagatcatctgctcaccacgggcagcgtgtttgccaatatcgccaacaactacgacaaatttaactacaccaatccgccgaaggactcgcatctgccgcgggtgcgtacgcatgtccgtgagtatgtgcagaacgatgtttatgtgaataacctacaggccaactacttccagtattttggcaatggtttctatgggcaggtctacggcggttatctggagaccatgtttggcggtgccggggcggaagtcctgtatcgcccggtagacagcaattgggcgtttggtctggatgccaactacgtgaaacagcgtgactggcgtagcgcgcaggatatgatgaagtttaccgattacagcgtgaagaccggacatttgaccgcatactggacgccgtcgttcgcccaggatgtgctggtgaaagccagcgttggtcagtatctggcgggcgataaaggcggtacgctggagatcgccaaacgcttcgatagcggcgtcgttgtcggcggttacgcgacgattaccgatgcgtcgccggatgaatatggggaaggggattttaccaaaggcgtatatgtttccgtaccgctggatctcttctcgtccggcccaacccgaagtcgtgcggcaattggctggacgccgctgacgcgtgacggtggtcaacagcttggccgtaagtttggcctgtatgatatgaccagtgacaggagcgtaaatttccgttaatactcaggccggataaggcgttcacggcgctatccggcaaattaccttattgaacaaaatataaacacaaataaaaaatatagatgcccgtcacatttgtgcgttatacagaaacctcgccgcagagaaagagggggctgttatgatgccattatcgcgctcacgtcttgagtttatcgccacgattttacaaaacgtactaaatttggggctgcttaccctcggtctgatcctggtcgtttttctcggtaaagagacggttcatctggcggatgcattattcgtgcctgagcaagccagcaaatatgaactggtggaagggctggtgatctactttctttatttcgaatttattgcgctgattgtgaagtactttaagtctggccttcactttccgctgcgctatttcgtgtacattgggatcacggcgattgtgcgcctgatcattgtcgatcataaaacgccaatggatgtattactctattcggcggcgatcctcctgttggttatcacgttgtggttatgtaattcgaaccgactacggcgagaataggcgtcgccacaccgtaacggacgtatggcgtggcaataaatcagctgctgtctataacgcataaaaaaagcgctccgaagagcgccaaaatacgaccataagtggggataacataacttgagggcagtggcattgcccgttgccgggcaggtacttcgataaaacttaacctttcacacccccagccgtcaggccgttgaccagccaacgttgcgccaacaggaacaccagggtgataggaatagctgaaaggacggcggcggcggcaaagtcgccccacaaatagttttgcgggttgagatattgctgcatacccacggccagcgtatagctgtccacatcgcgcagtaacaacgaggcgaccggaacttcggtaatcgctgcgatgaacgacagaataaacaccaccgccagaatcggtacggaaagcggcagcagcaccaggcgaaacgcctgccacggggttgcgccatccagcgcggcggcctcttccagcgaactgtcgatagtttcgaagtagcctttaatcgtccagacatgcagcgcgatgccgccaagataggcgaagatcacgccgccatgcgtattcagaccgataaatggaatgtattgtcccaggcgatcaaataacgcatacagcgctaccagagacaaaaccgccggaaacatctggaaaatcagcatccctttgagcagtgttgctttacctggaaaacgcattcgtgcgaaagcgtaggcgcaggtggtggagagcgccacgatgccgatggcggtaataccggcgattttcaccgagttccacagccacagcaggaccgggaagggaggcggcgttacccgaccatccgcatgttccacgctgaaacccagcgccagccgccagtgttcccaggagattttatccgggatcaggcttccggtggcgaagttcccttcacgtagcgagatagcgatgaccatcagcagcgggaacataatcgctgcgatgaaaatcagcagccccaggtgcgtgatgaggagacgcagtttctgagatttgggttggaccatagccattgttattatctcccttaatcaaacttcatacgcgtggctttcaggttcactattgccagcgcgcctaccagcaggaagatcagcgtggcaatggccgccgccagaccgaagtcctgaccgccgccgccttcaaaggcgatacggtaggtgtagctgacgagcaaatcggtataaccggcaggcgtggtggtgccgagacggtctggcccgccgttggtcaataactgaatcaggacaaagttattaaagttaaaggcgaagctggcgatcatcagcggcgttagcggcttaatcagcagcggtaaggtgatcttaaagaaattctgaaatggaccggcgccgtccattgcggaggcttcgtacaggtcatccggaatcgctttcagcagtcccatgcacaggatcatcatgtagggatagcccagccaggtattcacgataatcaccattgcccgcgcggtgttggggtcgctgaaccaggcaggtttaatgccaaacagcgcgctcagcatcatattgatttcgccaaagctttggttgaataaccctttgaaaatcaaaattgaaataaacgacggtacggcgtagggcagaatcagcaggacgcggtagatagctttacctttcagcgcttcccactgtacgaggcaggccaataccatcccaaccgccacagttaacaccacagtgaggaccgaaaagaccacggtccagacgaagatagcgaaaaaaggcttctggatcccttcgtcggtaaagacgcgcgtaaagtttttcgcgccgatagtaacggtataaccaggactgagtttttcatcaccccagcttccgtcggcgttgatcgactgataataaccgctatcgttatttggccggtattttacgccgctctggttattggtaagcaggccgtcatcagccagtgtgtacagcggacgggtaccggaaaactgacgcagcgagctcataatcactttactttcatccggcaggacggcggttatctggttcaacgccagacggttctgggtgattatccgcagattggcgcgttcgccgcccggcagggcatcggtctctttcagctgtaatttttgttcgccgccgaaggaaaatgcgtcagacaggtaatgtttgcccgtttctccgtcggtgagggccagttgccactcgtcgccgctcgggtaaagaccgaagttataggtttttcctgcctgataagaacggtccatcagcacttgttgggcgcgttcaaaggtgagctggttggtgctgctgtagttagtaaaggcgatagcgatggtgcacaccagcgggaatagcacaaacagccccatgccggcgaggccagggtaaacgtagcgccaggcataggttttacgatttgcgaaaatatacaggccagcagagcttaaaatcagcgtcatgatggcgaacagatactccccttgtacgtacattaaaactacaaggtaacccaccagcaggcccagcagaccaattactgaccatttaagctggtcgctttgccaccagtgtttctttttaatgacatccatgggggttttcctctacagcgttgaaacttcctggccggagatgtgcctgatggcgctgcgcttatcaggcctacggtgtgttgtaggcctgataaggcatttatgccgccatccggcacaggctcgcggcattacttagtgatacggctttgtgcatctttcagcgcggcatccacggtttgacggccgctggcggcgttgatcacagccgtacgtaccgcataccagaaggcggacatttgcggaatattcggcatgatctcgcctttctgggcgttatccatggtggcggcgatacgggggtctttcgctaactgctcctggaaagatttcagcgccacggcgcccagcggtttatctttgttcaccgcttccagaccctgatcggtcagcaggtagttttcgaggaactctttcgccagctctttattcgggctggcagcgttaatccccgcgctcagcacgccgacgaacggtttcgagggtttacctttgaaggtcggcagcagggtgacaccgtagttgactttgctcttgtcgatgttcgaccatgcccacggaccgttgatggtcattgccgtttcgcctttattgaaggccgcttcggcgatggagtaatcggtatcggcgctcatatttttgttcttgatcatatcgatcaggaaagtcaggcccgctttcgcgccggcgttgtcgacaccaacgtctttcacgtcatacttgccgttttcaaatttgaacgcgtaaccgccgtcagcggcgatcaaaggccaggtgaaatacggctcttgcaggttgaacattatcgccgacttccctttcgcttttagctctttatccagcgccgggatctcttcccaggttttcggcgggttcgggacgaggtctttgttataaatcagggagagggcttcaacggcgatggggtaggcgatcagcttgccgttataacgtaccgcatcccaggtgaacggatagagtttgtcctgaaacgctttatccggagtgacctccgccagcagaccagactgcgcgtagccgccaaaacggtcgtgcgcccagaagataatgtcaggaccgtcgccggtggctgccacctgcgggaatttctcttccagcttatccgggtgctcaacggccactttaatgccggtgtcttgctcaaattttttaccgacctcggccagaccgttataacccttgtcgccgttgatccagataaccagtttaccttcttcaattttggcgagagccggggcggaaatcatcatcgtcgtaagtgcggataatgcgaggatgcctacgccagttttaatcttcatatctcccatcctttttggtgatgtacacagaggtggtttaacggtctctagtttctttatacgacaacctctttccatcctccccgcccctacgccccaccccgactttatgtgatctgtgttgcataaatgtgagtaatgcgtgctggcgcacacaaaaacacgccgatttttgcgggcggcatcacgaaattccttttctgtccgcgcccgtggtctcaggtgttgtgtcctcatcctcccgcctcctcccccataaaaaagccggggggtggaggatttaccccagtcagggatcgcgcatagtcaggccatcatgaatgttgctgtcaatgacaggttgtaacgaagggagaagggcatggcgagcgtacagctacgaaatgtaacgaaagcctggggtgacgtggtggtatcgaaagatattaacctcgatatccatgacggggagttcgtggtgtttgtgggaccgtcaggctgtggtaaatcgaccttgctgcgtatgatcgccgggcttgaaaccatcaccagtggcgacctgtttatcggggaaacccgtatgaatgatattccgcctgccgagcgcggcgtgggcatggtattccagtcttatgcgctctatccccatctctccgttgcagaaaacatgtctttcggcctcaagctggcgggcgccaaaaaagaggtaatgaatcaacgcgtcaatcaggtggcggaagtactgcaactggcgcatctgctggaacgtaagccaaaagcgctttccggcggtcagcgtcagcgcgtagcgattggccgcacgctggtggcggagccgcgtgtgtttttgctggatgaaccgctctctaacctggatgccgcgctacgcgtgcagatgcgcattgaaatttctcgcctgcataaacgtctgggccgcacgatgatttacgtcacccacgatcaggtcgaggcgatgacgctggccgacaaaatcgtggtgctggacgccggtcgcgtcgcgcaggtcggtaagccgctggagctgtaccactatccggcggaccgttttgtcgcgggcttcatcggctcgccgaagatgaacttcctgccggtgaaagtgaccgccaccgcgattgaacaagtccaggtcgaactgccgaatcgccagcaaatctggctgccggtcgaaagtcgcggcgtgcaggtcggcgccaatatgtctttaggtattcggccggaacacctgctgccgagcgatatcgccgatgtcaccctggaaggcgaagtccaggtggtcgagcagttagggcacgaaacacaaattcatatccagatccccgccatccgtcaaaacctggtttatcgccagaatgacgtggtgttggtagaagagggcgccacattcgctatcggcctgccgccagagcgctgtcatctgttccgcgaggatggcagcgcatgtcgtcgtctgcatcaagagccgggtgtttaaggcctccataaaaaaacgaaacgcaaaaccattcgcagttttagaaggtggcagcgtttaaagaaaagcaatgatctcaggagatagaatgatgattactctgcgcaaactcccactggcggttgctgtcgcagcgggcgtaatgtccgctcaggcaatggctgtcgatttccacggttacgcccgttccggtattggctggacgggaagcggcggcgaacaacagtgtttccaggcaacgggtgcccaaagtaaataccgtcttggtaacgaatgtgaaacctatgcggaactgaaactgggccaggaagtgtggaaagagggcgataagagcttctatttcgacaccaacgtcgcctattcggttaaccagcagaacgactgggaatcgaccgatcccgccttccgcgaagcgaacgtgcagggtaaaaacctgattgaatggctgccgggctctaccatctgggccggtaagcgcttctatcagcgtcatgacgtacacatgatcgacttctactactgggatatttcaggtcctggcgcaggtatcgaaaatatcgatctgggcttcggtaagctttcactggcggcgacccggtctactgaagcgggcggctcttacaccttcagcagccagaatatttatgatgaagtaaaagataccgctaacgacgtctttgacgtacgtctggctggtctgcaaacgaacccggacggcgtactggagctaggcgttgattacggtcgcgccaatacgaccgatggttataagctggctgatggggcatcgaaagacggctggatgttcaccgccgaacacacgcaaagcatgttgaaaggctataacaagtttgtcgtgcaatatgccaccgatgccatgaccacgcagggtaaaggccaggcgcgcggttccgacggttcttcatctttcactgaagaattgtctgatggaaccaaaattaattacgccaataaggtcatcaataataatggcaatatgtggcgtattttggatcatggcgccatctcgcttggtgataaatgggatttgatgtacgtcggtatgtaccagaatatcgattgggataataacctgggtactgagtggtggaccgtgggtgtacgtccaatgtacaagtggacgccaatcatgagcaccctgctggaagtcggctacgacaacgtgaaatctcagcagaccggcgatcgtaacaatcaatataaaatcaccctggcgcaacagtggcaggcgggcgacagcatctggtcgcgtccggctatccgtattttcgccacctacgcgaaatgggatgagaaatggggctatatcaaagacggcgataacatttcccgttatgccgcagcgactaactccggcatttccaccaacagccgtggcgatagcgatgagtggaccttcggcgcccagatggaaatctggtggtaatacgatggtcatctgacgtaacgaggggcgcaagcccctctgaaacatcaggtctgatgatgcttgtaagccgaataaggcgccagccgccattcggcgatatgtttgggttggcgcgctattgcctggctaccgctgaacccgccttattgaggtgagaataatgaaaatgaagaaaagtctcgtcgccctctgtttaaccgcagggctgttcgccagcgtgccgggtatcagcctggcggaagtgaactatgtaccgcaaaataccagcgccgcgcccgctattcctgctgctgcgctacagcaattaacctggacgcctgtagatcagtcaaaaacgcagtctacccaactggcgactggcggccagcgccttgacgtcgccggcattaccggcccggtcgccgcttatagcgttccggcgaatatcggcgagctgacattaactctgaccagcgaggtcaataagcaagccagcgtttttgcgccaaacgtgttgattcttgaccaaaatatgacgccttcggcgttcttccccagcagttactttacttatcagcagccgggcgtcatgagcgcagaccggctggaaggcgtgatgcgcctgacgcctgcgttggggcagcagaaactctatgttctggtgtttacgaccgaaaaagatcttcagcaaaccactacgctgctcgatccggcaaaagcctatgccaaaggcgtcggcaactctatcccggatattcccgatccagttgctcgccataccactgacggcgtggtgaaactgaaggtgaaaaccaacagtagctccagcgtattggtcgggccgttgtttggctcgtccggtaccgggccggtaacggtaggcaataccgccgcgccggtcgctgcgccagcgccagtcgcgccgaagaaaagcgagccgatgttgaacgatacggaaagctactttaataaagcgattaaggatgccgtagcgaaaggcgacgtcgataaagcgctgaaactgcttgatgaggccgaacgtctgggatcgacatctgcccgttccacctttatcagcagtgtaaaaggcaaggggtaattatttccccacagtgctgattttgcagcaactggtgcgtctcctggcgcacctttttttatcatttcatgcgaattgttatttttttgttgcgcaacagatcacttaattgtgattgcgccccccgtaatgtcttttctgagatacaatgactttaggttatgaatcggagagtaaggcatgtcacaccctgcgttaacgcaactgcgtgcgctgcgctattttgatgcgattcctgcgcttgaaccccatttgctggactggctgttgctggaagattctatgactaaacgttttgagcagcagggaaagcgggtaagcgtgacgctgattcgggaagcgtttgtcggccaaagtgaggtcgaggaagcatcaggtttactgccatccgagtcccgctactggttacgtgagatactgctttgcgctgacggcgagccctggcttgccggacgtaccgtggtaccggaatccacgctgtgcggacctgaacaggtcttacaacatctgggtaaaaccccgcttggacgttatctatttacatcatcgacactgacccgcgattttattgaaattggacgcgatgcaacgctgtgggggcgccgctctcgactgcggttgagcggaaaaccgctgttgcttaccgagctttttttacctgcatcgccgctgtactgagaggaagataaagatggagtggagtctgacgcagagtaagctgctggcgtttcaccgtttgatgcgtacagataagcctattggcgcgttgctgctgctctggccgacgctttgggcgctatgggtggcgacgccgggtatgcctcagctgtggattttggcagtttttgtcgctggcgtgtggttaatgcgcgcggcgggctgcgtggtaaatgattatgccgatcgtaaatttgacggacatgtaaaacgtacggtcaaccggcctttacccagcggcgccgtgacagagaaagaagcgcgcaacctgtttgtggtgctggtgctgctggcgtttctgttggtgctgacgctgaacgccatgacgattctgctttccgtggcggcgctggcgttggcctgggtttatccctttatgaaacgctacacccacctgccgcaggtcgtgctgggggccgctttcggctggtcaatccccatggcgttcgccgcggtgagcgaatccctgccgttgagctgctggctaatgttcctcgccaatattctctgggcagtggcttacgatacgcaatatgcgatggtcgacagagatgatgatatcaagataggcattaaatcgacggcgatcttgtttggtcgttatgacacattgattatcgggattctgcagcttggcgtcatggcgttaatggcgctgatcggctggttgaatggtctgggatggggatattactgggctgtgctggtggcgggcgcgctgtttgtctaccagcaaaaactgattgcgaaccgtgagcgtgaagcctgctttaaagcctttatgaacaataactacgttggcctggtgctatttttagggctggcgatgagttactggcacttctgatgtcatgccgggcggacccggcctacaaagccaaaattttcaatacgtcatatcagttgcccgataagcttacgccatcgggcatttcaggcactggcttactcgccctgcgtcgcgctttcaatcgtcagacggacatcagaggtaatcagatcggcaagcatctgatatatcttcatcgtttctgccggttcggcatcgcccgtatcactgatataaccctcatcccgtagcgtcaacacgagtgaactgaacaccgctttgtcgaaaaactccggcgcgttaataccgtgcaggacagacagacgttgcgccacggtacggctttctttctccagcgtactgcggttgatggacggattggcgctcaacagccagaacgtaatggcataacgctgtagcgtttcgcgcgcgcctgccgccagcagttgcagcgtacgggaatgcgtcgggttgatatgcagttcatcatcctgcagggtaattagcccctgacgctgcatttcactggccagcgcgtcaatgaccgaggctaactcctcgcgctcccagcgcaggaacagctccgcttttaacatcggatagagcgcttcaacatgctgctgcaacgcatcacgcgaaatgcgacgatgctgggtgataatcgccgccatcagcgaaggcataatcaacatatgcgcgatattgttacgatagtaggtcatcaacaccgcctgctcgcgcggcagaatgatgatatcgccaatggtgtctttctcgacctcaaacttattcatctgcagcgcgtgagcgatgagctcgccagcgctggcggcaggaacggttgagtctgtggaataagggacattgcgcatcagatcgagatagcaatcaagctgctcggtgagctgctcgcgggtgagcgagcgctgacgcgacgctaacagcgcggtacaacacaggttcatcgcgtttgccgcgccagcgttgttaatacgcaccatcagatcggcggcgatactatttaccgtcggcgtcagccaggctgggcgtatggcctctatagggtcgatagattcgcgccactccggcacatgctggttcaggtacgtcatgagcggcatcggttcgccaaagttaacgtagccctgacccagattgcgcagcttgctcaagcctttcagcatctgcggcaggctctctttctcttttgtcgcgccgcgcagttctttcgcataggtgcccacttccatgacgtgctcatagccgatgtaaataggcactaacgtaattggacgggtaccgccgcgcagcatcgcctggatagtcatcgacagggtgccggttttcgggtctaacaaacgtccggtacgcgaacgtcctccttcgacaaaatactcaaccgagtaaccgcggctgaacagctcgcccaggtattcgcgaaagacggtggaatagagtttattccccttaaaggtgcgacgaataaagaacgcgcccagacgacggaaaatcgggccagcgggccagaaattaaggttaatgcctgcggcaatgtgcggcggaaccagtccctgatggtacagcacataagaaaggagcaaatagtccatatggctgcggtgacagggcacatagacgatttcatgcccgtcgtgcgccagttggcgtacgcgctcggcgttatgcacgttaatcccctggtacagtcggttccaggtaaaccccaaaatcctgtcggtcaaacgaatcatctcgtaagagaagttcgccgcgatctcttccatcagcgcaatggcgttttgctgcgctttttcatgagagattttcttactgcgcgcttcgtcttctaccgcgcgggcgatcgctttcgaggccagcagtttgttaaacagatcctgacgggcgggcaggcgtgggccaaccgccgccaggcgctggcgagcaaagtgcatacgcgccacgcgagccagcttctgcgcgatgattttatcggtgccgtgttcatcagccatgcgacgcaatgagacggacggcgagaatcggacaaagctatcgcgacccagccaggagatggcaaagaatttctgtacgccgttcagcatacgtaaaggcgggttatcttctcccttttcacgacccggcgcgcggccaaacatcacggaaacgggcaccatctgcacgtccaaagccggattactccgatgcagatcgagataatcgtgaaaaagtttcaccgactcttcttttggcgtgtaataggtaaagacacgcggtccgccgtgaataaatacatagcgtggcaacagcgcgccgtcgatctccagcggctccagcggatccgggagatcgtgcgccagacattgcgcccgcagcgtcagtaagtccgcttttgagttgtatggcaagacatacataatggggcgagaagtatcgagccccaattcctgggcgggttccgccggaatagacttgctttttaccagtatgcttaatggtaaattcagtaatttgtagtaaattcgtggccagccggacataaacgatgtaaagcctctggttaataatgcaaatgcggtgcaaggatatcagaaagtttagcgaatttctgttgtatcccgtcatacttcgcgctgcgttacggcagtccgaatcgtgcagggcaaccgtataatgtcattgacgttaataatgtaaaaaggttcttttgatggccaataataccactggattcaccagaattatcaaagcggcaggatattcctggaaaggatttcgcgccgcatggactcacgaagcggcgtttcgccaggaaagtatcgcggtattgctgggcgtcatcatcgcctgctggctggatgtggatgcgattacccgtgtgttattgataggttccgttttacttatcatgattgttgaaatcctcaacagcgctattgaagcggtcgttgaccgcatcggttctgaataccatgagctttccggccgtgcgaaagatatgggatcggctgcggtgctactgtctattttcgttgccctgatgacctggggcatcctgttatggtcacattttcgataaaggttccaaattttataaatctcttgttttttgcgccgtttgtggttccaaaatcacctttaactgtatatactcacagcatgactgtatatacacccagggggcggaatgaaagcgttaacggccaggcaacaagaggtgtttgatctcatccgggatcacatcagccagacaggtatgccaccgacgcgtgcggaaatcgcgcagcgtttggggttccgttccccaaacgctgcggaagaacaccttaaagcgctggcgcgcaaaggggtgcttgaaatcgtttccggcgcatcgcgaggtatccgtctgttacaggaagaagaggacggattaccgcttgtcgggcgtgtcgcggcgggtgaaccgcttctggcgcagcagcatattgaaggccattaccaggtcgatccttcgctgttcaaacccagcgccgatttcctgctgcgcgtgagcggtatgtcgatgaaagacatcggtattatggatggggatttgctggcggtacataaaacgcaggacgtccgtaatggccaggtggttgtcgctcgcattgacgatgaagtgacagtaaaacgcctgaaaaagcagggcaataaagtggagctgctgccggaaaacagcgagtttacaccgatagtggtggatctgcgcgaacaaagctttacgattgaagggctggcggtaggcgtcattcgcaacggggaatggttgtaatctcgttttaatctccttgtaagccgtcatccggcaatcgtgcagcctgatggcgctgcgcttagcaggcctacgggaatgcagttcctgagatgattaatttgtaggccggataaggcgttacgttgccatccggcaatgcgctcgtttcgtttaactccttgtcaggcttttctccatgccgctttttacctcctctgataaagctctctggcatctcgcgctgccgatgattttttctaacatcaccgtccccttgctggggctggtcgatacggcggtgattggtcatctggacagcccggttttcctgggcggcgtggcggtgggcgcgactgccaccagctttcttttcatgctgctgctatttctacgtatgagcaccaccggcctaacggcgcaggcatttggcgccaaaaatccgcaggcgttagcccgggcgctcattcaaccgttattactggcgctgggcgctggcgtgatgattgtgctatttcgcacgccgcttatcgagctggctttatatattgtcggcgggaacgacgctgtcctggtgcaagcgagacgcttccttgaaattcgttggctaagcgctcccgcgtcactggcgaatctggtgctgctcggttggctgttaggcgttcagtatgcgcgggcgccggttatcttgttggtcgtgggcaatatcctcaatatcgcgctcgacctgtggctggtgatggggcttcatatgaacgtgcagggtgctgccctggcgacggtcatcgcagaatatgtcacgttactgatcggcctcatgatggtacgtaaagttctccatctccgcggtgtgtcgctggatatgctaaaacaggcctggcgcggcaacgtgcgccgccttttggcgctcaatcgcgatatcatgctgcgctcattgctccttcagctttgttttggcgcaatcacggtgtcaggcgcgcggctgggcagcgatattatcgcggtaaatgcagtcctgatgaccttactcacctttacggcctatgcgctggacggttttgcttatgcggtggaggcgcactccggtcaggcttacggcgcgcgtgacggtagcaagctactggacgtctggcgagcggcgtgtcgtcagtcaggaattgtggccttgttgttttccacagtctatgccctggcaggcgaacatattgtcgcgttactgacctcattgccgcaaatacagctactggcggatcggtatcttatctggcaggtggtattaccgctggtgggcgtatggtgctatctgctcgacggtatgtttattggcgcgacgcgcgctgccgaaatgcgcaatagcatggctgtcgccgcgggaggattcgcgctgacgctcttcgccctgccggtattaggaaatcatggtttatggctggcattaaccgtgttcctggcgcttcgcggtctgtcgttgagccttatctggcgtcgtcactggcgcgagggtacatggtttgccagatcgtgacggttaaaaattctgaatataaaaccgaaggccgaattcctgcctacaattattatcacgtccagcagaaattgcagtgcatttgggcgaataacacctgctattcctaaccgaatgatgaggacaagatgatgaataaagacgaagccggcggtaactggaaacagtttaaaggtaaaatgaaagaacaatggggcaaactgaccgatgacgatatgaccgttatcgaaggtaaacgcgaccaactggtaggtaaaatccaggagcgttacggttaccagaaagatcaggcggaaaaagaggttgttgactgggaaacccgtaacaactatcgctggtaatatgttttcccctaccaggagtacatggatgtgcttcccactgtttgcttatgaatgcgggcgtgcccctctctactgccgcccgttttccgttcaggctaacgcggttttttcttcaccagcaccgagtgatcgtgaccacagtcgcccggatggcgacacgcttccacttctacgcacgcagggcacagaccgtgcgcctcaataacgttatgtcgtagcgcaaatcccattttagccgccagcgtatgcatgatgtcttccacgccctcggcacactcttccttcaccacgccgcaacgatcgcagataaacatggccgagctgtgcgtcggctggtcgaacaggtggcaaaccacataactattggtggattccactttatggacaaaaccctgttcgagcaaaaaatccagcgcgcggtaaatggtgggcggtttggcctgtggttccgtttcgcgcagcaaatcgagcaaatcgtatgcgctgatggcaccctgttgcagactcatcaggcgcagcacttcgaggcgctgaggcgtcaggcgcacgttgcgctgcgcgcagagtttttcagcttgcgccagtaactcttgcgttgtggtcttttccatgtagcacctcgaatggcatgaaagtctaatccgttactttaccacgagctgcttaaaactctgaaattaccccgcgacaatatatcgcctgctaagcttttccgcgccagtattctcatctatacataatgagggtcgatattataacaacaggatttaacatcactatttcacagcaatagttcgcctctgtccggtaaagcgtggcggaggaattacttcacctgataataagatgggctaactgtgaacaaaaacgtcaaactttcactgattgctatcgcggtctcgctttttatggcaaagcaggcgagcgccgccaatacctggacggaagcgcgtaatgacgcaatgggcgggacgggcgttgcgtccgcgaattatggcagcggagtactattaaatccggcgttactggcaaaagccaaaccggaagacaatatcactgttgtccttcctgcggtcggcgtccagattacggataaagacaatctccaggatgaaattgacgatatcagcgataaagtggattactacgatgaggtcgtcgataaccttacgctggggcaaattctgctcaatccgcgaggcgtgctgaatcaatttcagggcgccgcgcgcgacctggccgatgagctggaatatctcaacggaaaaaccgcccgcgccaatgccggcgccgggttggcggtaagtattccagggcaaacgctttccgtggcgtttatcgccaaaggttatgcgcatgggcgcgtgagttcgtccattgatcagaacgatattcagtatctgcgcgatatccagcatgatgaacgtgtcgcgcttcgtgaagcaggacgcgctgctttgctggggtctgacgaaattacaaagcatttaaactctaccgcgtcggggcgggtagcgattgtgtctgactacggtattgcactggcgaagcagtttgtggtgggcgaggtgcctgtttccattggcgttacgccaaaactgcaaaaaacctggctctataactacaccacctcaatttataactacgacagtagcgactggaatagcagccgttatcgcaatgacgatacgggttttaacattgatgcggggcttgctgccgatatcggtgaaaactggacgttggggctgagcgggcaaaatctggtatctcgcgatatcgatacgaaagatatttacatcactaatggtatgacgggagaaaccaccaactacaaagatacataccaaatccgccccctggttaccgcgggcgtcgcatggcataacgatttgctgaccgtaagcgccgatggcgatctgacggaaacgaaaggctttaagagcgaagacaattcacagtacgttggcgtcggcgctgaagttcgaccgttatcatggctggcggtgcgcgcagggtatcgtgcggatgtgaaaaataacgatagcaatgtggttaccggcggtcttggctttgcgccctttaaccgtgtgcatctcgatttaatgggactgtacggcgaagatgaaacctggggggcaggcgcgcagcttacgatgacattctgaggtgctttcaccggaggcgctacgcctccggtttagcgttatgctatagtaacgccccttttttaaccggatgcttatttattcgccatgcagcctgaaacccagtcctccgctttccctgcttatcgcttctccatcgcgcctatgctcgactggacggacagacattgccgctatttcctgcgtttgctgtctcgccagacgctgctctacaccgaaatggtgaccacgggcgcgattattcacggtaagggtgactatctggcttatagcgaagaagagcatccggtcgctctacagcttggtggaagcgatccggctcagcttgcgcattgtgcaaagctggcggaagcgcgtggctacgatgaaattaacctcaacgtggggtgcccctccgatcgtgtgcaaaatggtatgtttggcgcctgtttgatgggcaatgcgcaactggtcgccgattgtgttaaagccatgcgtgatgtcgtctcgattccggtaacggtaaaaacccgcattggtattgacgatcaggacagttatgcgtttctgtgtgatttcatcgatacggtttccggtcggggcgaatgcgagatgtttattatccatgcgcgcaaagcctggctttctggcttaagcccgaaagaaaatcgtgagatcccgccgctggattacccgcgcgtataccagctaaagcgggattttccgcacctgaccatgtccattaacggcggcatcaaatcgctggaagaggcgaaggagcacctgcgccatatggatggcgtcatggttggccgcgaagcttatcagaatccgggtatactggccgcggtggatcgggagatttttggcgccgataccaccgatgccgacccggttgcggtggttcgcgcgatgtatccctatattgagcgtgaattgagccagggagcgtatctggggcatatcactcgccatatgctggggttgttccagggcattcccggcgcgcgacagtggcgtcgctatctgagcgaaaacgcccataaagctggcgcggatgttgctgtactggagcaggcgctaaaactggtagcagacaagcgttaaaagttcgccaaaaattagtcaatctcaccacgctctgtgcagtcttgcagggcgttttctttatatatcaaaaacataaatattggcatgatttttgtaatagcttacctgaccagacccggtaagcgccgtgccgccgggcaatgccatctttatggggagcgactatgctggaactactttttgtgcttggcttttttctgatgttaatggtgacgggcgtctccttgctgggcattctggccgcgctggttgtagcgactgccgtcatgttcctgggtggaatgttcgccctgatgatcaagctgttaccgtggctactgctggcggtggctgtggtgtgggtgatcaaagcagtaaaaacgccaaaaatcccacagtatcagcgcaataaccgtcggttttactaaggtattgagcggttcgtcacaacctggaactttgccctcacaagcaaataggaatcgattattaaatctgtcatgattgcgcaggtaacgaattcatcgcgctgtaccctacatacagccgaacaaaaaaagaaagggcttcccgggtggaagcccaatttctttgcagagctattacggaatcagcaggcttgagccctgtgtggcccggctttccagcacttcatgcgcgcgacgggcatcttttaacgcatagcgttgattttcagccacatcaactttaatcacgccgctggcgatcaatgagaacaattcattgctggcttcggtcagttcttcacgcgtcgtaatatacccctgtagtgaaggtcgcgtggcatacagggaacctttctgattcagaatacctaaattcacgccagtgacggggccggacgcattgccgaaactgaccatcagtccccgacgttgcaggcagtccagtgaggcttcccaggtatctttccccacggagtcatagaccacgcggacttttttgccgccggtgatctcttttacccgttcgacaatgctctcctcacggtaattaatcacctgccaggcgccggcgtccagcgcccgctgcgctttttgcgcgctaccgacggtaccgataagcttcgcgcccagcgctttcgcccattggcaggcgatcagaccgacgccgcccgcagcggcatgaaacaggaagggttcgtcgggtttcacttcataggttttgcgcaacaggtaaaaaacggtcaatcccttgagaaaagaggctgccgcctgttcgaaagaaatggcgtcaggcaaaatcgcggctttatctgcggtgacgttatggacggaactgtaagcgccgagcgttgactgcgcgtagacgacgcgatcgccgacgcgaatgtgctccacgccgttgccgactttactgaccacacccgcagcttcggttcccaggcccgcaggcaacgacgggggcggatagagtccgctacggatataggtgtcgatgaagttgataccaatggctttgttctcaacctggatttcgtgttccgccggttccgttggcgtaaactccacggtctgaagcacttccggaccaccatgcttgtgaaattcaatacgcgttgccatgcttcctccaaaagaaatgtggtaatctttcgacccaatcactatctcggtaactccattcactatggcaggaaataaacccttcaacaaaccacagactgatgcccgcgaccgcgatccgcaggttgccgggataaaagtgccgccgcactcgattgaagcggaacagtcggtgttgggcggtttaatgctggataacgagcgctgggacgatgtggccgagcgcgtggtggcggaagatttctatacccgtccgcatcgccatatctttacggagatggggcgcttgcaggaaagcggcagtcctatcgacctgatcacgctcgcggaatcgctggagcggcagggccaactggacagcgtcggcggtttcgcctatctggcggaactgtctaaaaacacgccaagcgcggcgaacatcagtgcttatgcggacattgtgcgcgaacgcgccgtggtccgcgatatgatcgcggtggcgcatgaaattgcggacgccggttacgatccacaggggcgcaatagcgacgaactgctggatctggcggagtcgcgcgtcttccagatcgcggaaaaccgggccaacaaagacgaaggtccgaaaagcatcgaccagatcctcgacgctaccgtggcgcgtattgagcagttgttccagcaaccgcacgatggcgttacaggcgtggataccggctatcaggatctcaataaaaagacggcagggttacagcgttcggatttgattatcgtcgcggcgcgtccctccatgggtaaaaccacttttgcgatgaacctctgcgaaaatgcggcgatgttgcaggataaaccggtactgatcttcagcctggagatgcccggcgaacagatcatgatgcgtatgctggcctcgctgtcccgcgtcgatcagacacgtattcgtaccggtcaactcgatgatgaagactgggcgcgaatctccggcacgatgggcattctgctggagaaacgcaatatgtatattgacgactcctcaggtcttacgccgacagaagtccgttcgcgcgcgcggcgtattttccgcgaacatggcgggttaagtctgattatgatcgactacctgcaattgatgcgtgtgccgtcgctttctgataaccgtactctggaaatcgccgaaatttctcgctcgttgaaagcgctggcgaaggaactccaggtgccggtcgtggcgctatcgcagcttaaccgctccctggaacaacgcgcggataaacgtccggtgaactccgacctgcgtgaatccggctctattgaacaggatgccgacttaattatgtttatctaccgtgatgaggtttatcacgagaacagcgacttaaaaggcattgctgaaattattattggtaagcagcgtaacggtcctatcggtacggttcgtctgacgttcaatggtcagtggtcgcgcttcgataactatgcgggaccgcaatacgatgatgagtaactctccgtcattctgttaacaaggaattcaaatgcaagcggcaacagtcgtcattaaccgccgcgctctgcgacacaacctgcaacgtctgcgtgaactggcgcctgccagtaagctggttgcggtggtgaaagcgaacgcttatggacacggtcttctggagaccgcgcgaacgctccctgatgctgacgcttttggcgtggcgcgtcttgaagaggctctacgtctgcgagcgggcgggatcacgcagcctatcctgctgctggagggttttttcgacgccgccgatctgccgaccatttccgcgcaatgtctgcatactgccgtacataatcaagagcagcttgccgccctggaggcggtggagctggcggagccggtaacggtctggatgaaactggataccggtatgcatcgtctcggcgtgcgtcccgaagaggcggaggcgttctaccagcgtctgacgcactgtaaaaatgtacgccagccggtgaatatcgtcagccattttgcccgtgcggatgagccggaatgcggcgctaccgaacatcagctcgacatttttaatgccttctgtcagggtaaacccggtcagcgctctattgccgcgtctggcggtatcctgctgtggccgcagtctcactttgactgggcgcgtccgggcatcattttgtatggcgtatcgccgctggagcacaaaccctgggggccggattttggttttcagccggtgatgtccttaacctccagtttgatcgcggtgcgtgaccacaaagcgggcgaaccggtgggctacggcgggacatgggtgagtgagcgcgacacgcgcctgggcgtggtggcgatgggttatggcgatggctacccacgagcggcgccttccggtacgccagtactggtcaatggtcgtgaagttccgattgtcgggcgggtggcgatggatatgatttgcgtagatttggggccaaacgcgcaggataacgcgggcgatccggtggtcttatggggtgaaggtctgccggttgaacgtatcgctgaaatgacaaaagtaagtgcttacgaacttatcacgcgcctgacctcaagggtggcgatgaagtatattgattaaatacgcggcgggccgggtggcgcctgcgcttatccggcttgtatcgcgcattggctgtaggccggataagacgttcacgccgctatccggtaatatgcgcatccaccacaacatcctctcgatcttctcgtccttccggtttattgtgttatttcctgccctctgtaaacctggagaaccatcgcgtgtttcaaaaagttgacgcctatgccggcgatccgattctttcactgatggagcgttttaaagacgactcccgtcacgacaaagtaaatctgagcattggcctgtattacaacgaagacgggattatcccacagctcaaaacggtggccgaagccgaagcccggcttaacgcgcagccgcatggcgcttcgctgtacctgccgatggaaggactcaatacttatcgccatactatcgcgcctttgctctttggcgccgatcacccggttcttcagcaacagcgcgtggccactatccagacattaggcggctccggcgcgctgaaagtaggcgcggatttcctgaagcgttatttccccgacgcaggcgtatgggtgagcgaccccacctgggaaaaccatattgcgatatttgccggggcaggattcgaagtgagtacttacccctggtatgacgacgcgactaacggcatccgttttaacgatctgctggccacgctgaatacgttacctgcgcgcagtatcgtgctgctgcacccctgttgtcacaacccgaccggggcggatttaacgccttcgcaatgggatgcggtgattgaaatagtgaaagcgcgcgatctgattccgttccttgatattgcctatcaggggtttggcgcaggcatggacgaggatgcttacgctattcgcgccattgccagcgccgggttacctgcgttagtcagtaattctttttcgaagattttctcgctgtacggcgagcgcgtcggcggcctgtccgtggtgtgtgaagatgctgaaatcgccgcgcgggttctgggacagctaaaagcgacggtgcgccgaatttactccagtccgccgtgtttcggcgctcaggtggtcgctacggtcctgggcgatgaggcgttaaaagcgggctggctggcggaagtcgacgcgatgcgtaaccgcattatatcgatgcgccagacgctggtgaaggagctgaaggcggagatgcctgaccgcaactttgattacttgttacagcagcgcggtatgttcagctataccgggttaagcgcggagcaggtcgagcggttgcgcgatgagtttggcgtttacctgattgccagtggccgcatgtgtgtcgccgggcttaatgcttcaaatgtacaccgcgtggcgaaggcatttgccgctgtcatgtaatattcaggccggacggcgataacagtgccctccggcctgacaatagctgttgtgatcatcctcttttttcgtaacaaaaccgcagataatccttccttttgaccgttactggcgttatggtcagatagttttttgagcaaagactcatcttaataattataatattttgaattttaagggaaaaccatgaaaaaaataaccctggcgctgagtgccgtctgtttgttgtttacgctaaaccattccgcgaatgcgttagtatcttccccttcgacactcaatccgggcactaatgttgcaaaactcgcggaacaagcgcctgtccattgggtctctgtcgcccagattgaaaacagcctcaccggacgcccgccgatggcggtcggctttgatattgacgacaccgtgttattttccagccccggattctggcgcggaaagaaaacctattccccggacagcgacgattatctgaaaaatccggccttttgggaaaaaatgaacaacggctgggatgagttcagtattccaaaagaagtggcccgacagctcattgatatgcatgttcgccgtggcgacagtatttactttgtcactggtcgtagtcagacgaaaacggaaaccgtgtcgaaaacgctggcggataacttccatattccggcggcgaatatgaatccggtgattttcgccggcgataaaccggaacaaaatacgaaagtacagtggctgcaggagaagaacatgcgtatcttctacggcgattcggataacgatattaccgcggctcgtgattgtggtatccgcggtattcgcatcctgcgcgcggctaactccacctacaaaccgctgccgcaggcaggagcgtttggcgaggaagtcattgtcaactcggagtactaaaaatcaggagagcgtcaggctctccttttttgcatgatttttgcacaaacttgccccgctggcttttaccttttccagacttgctgcacactattcaggagacgtttgtttttaggaaggagcagcctatgtggtatcagcgcaccattacactgagcgagaagccgcgcgggtttcatctgataacagatgaaattatcgataaattgtctggcttaccgcctgtcgaaacgggtttgctgcatctgttgttgctacatacctcggcctcgctgacgctaaacgaaaactgcgatcccaccgtgcgcgctgatatggagcgccatttcctgaaaaccgttcccgataatgcggcgtatgaacatgactacgaaggcgcggatgacatgccttcgcatattaagtcgtcagtattgggcgtctcgttgctgctgcctgtacgccaggggcgtttacagttaggaacatggcaaggtatctggttgggagagcaccgtattcacggcggtccacgtaaaatcatcgcgacactacaaggggaatgataatgaccatttcggaattactgcaatactgcatggcaaaacctggcgcagagcagagcgtccacagcgactggaaagcgacgcaaattaaagtggaagatgtacttttcgcgatggtaaaagaagttgaaggacgcccggcagcctctctcaaaaccagcccggaactggcagagttgttacgtcagcagcacagcgatgtacgaccgagtcggcaccttaataaagcgcactggagcacggtctatctggacggctcgctgccggattcacaactctattatctggtcgatgcctcttatcaacaggcggtaaatgcgctgtcggaagataaacgcaagcagttgccgcagtcctgattatagcgcgccgaccaacaacgccagggcgatatcaatgaggcggatgaccgtagaccggatacggctgccgagggcgatttgcgcattattggcgcgtagcctggcgaggtcccgctgtccttccagcagaataatcatatcgtcgtcgtccagccagccgcgagcatgttcctgaagcgcgcgggcgataaacgcggcggactcgcggatagcgtcgtcgctgtcttctcttgcctgcttatacgtctggataaactcggcaatcgccgaggacgctacagggtgttcggcccgggcggtggtcatcaggtaatgtatttcgttaatagacgccattttcatctccttgagtgcagtgggcgccccaatgcagacactcaccctgtatagctaatttccagacctgattattttgctgttggtatctctctgcctggatgtgagtaagtggttgcttacgttgcataacccgcgcataaagacgcaaatagtgatttttcagcagcgccagattatcgagtcggtgtttatccccaccttgacgggcgacccgctcagcctgaaaaaatgtctggcggatatcgcggtcatccttgagcagtgtctctttttgccacggtattcgcgccgcgtcctgcaggaagcgggttgagcgcgtttgtaatagcgtcagttgttgaaaagccacggcgctaaagcggtcaggcagcgtacaggcggctaaaaacaggcacagcagtagtgtgattgcgtagggcaacttcatggtgttttccataacagaccgtttgcgctatcacatgtcagagcgaggcggcacgcaaatcacaaatgctcaacacggatacaatgaggtgggatgaggaaaaatgatgccgcttcccggcgaatcggaaagcggcgtgaaggttatttgagcataggtttaaggaagcgggcggtatgcgacgcctcgcactccgccacggtttccggcgtaccggagacgagaatttcgccgccgccgctgccgccttccgggccgaggtcgacaatccagtccgccgttttaatgacgtccaggttgtgttcgatcaccacgatggtgttgccctgatcgcgcaactgatgcagaacgtcaagcaactgctgaatatcggcaaagtgcaggccggtggtcggctcgtcgagaatatacagcgtctgcccggtgccgcgcttcgacagttcgcgcgccagcttcacgcgctgggcctcgccgccggaaagcgtcgtcgccgactgaccaagacggatataggtcagccccacgtccatcagcgtctgcagcttacgcgccagcgccggaaccgcatcaaagaactcacgcgcttcttcaatggtcatatccagcacttcgtggatggtcttgcctttgtacttaatctccagcgtttcccggttatagcgcttgcctttgcactggtcgcacggcacgtaaatatccggcagaaagtgcatttcgactttaatgacgccatcgccctggcacgcttcgcagcgaccgccgcgcacgttgaagctgaatcgccctggcgtgtagccgcgcgagcgagactccggcacgccagcaaaaagctcgcgaaccggggtaaagacgcccgtataggtcgccgggttggaacgcggggtgcgcccgattgggctctggtcgatatcgatcactttatcgaaatgttccagcccctgaatatcccgatacggcgccggttcggcgatagtcgccccgtttaactgacgctgggcgatggggaacagcgtgtcgttaatcagcgtcgatttaccggaacccgagacgccggtgatacaggtaaacagccctaccggtagcgtaagggtcacatctttcaggttgttgccgcgcgcgccggtgagtttgagcactttttctggatttgccggcacgcgttgtttcggcacttcaattttgcgtttaccgctcatgtactggccggtcagcgattccggtaccgccataatggcttccagcgggccttccgccaccacctcgccgccgtgaacgcccgcgccggggccaatatcgatcacatggtcggcggcgcgaatggcgtcttcatcatgttccaccacaatcacggtattgccaagattgcgcagatgaatcagcgtacccagcagccgttcgttatcgcgctggtgcagaccgatggacggctcatccagcacatacatcacgccgactaacccggcgcctatctggctcgccagacgaatacgctgggcttcgccgccggaaagcgtctctgccgagcgggagagcgtgagatagttcaggccgacgttcaccagaaacttgaggcgatcgccgatctcttttagcactttttcggcgattttcgctcgttgcccggaaagcttgagattagtgaaaaaatccatcgcatggccaatgctcatatcggaaatagcaggcagcggcgtattttccacaaatacatggcgcgcttcgcgattcagtcgcgttccttcacagctggcgcaggggcgattactgatgaacttcgccagctcttcgcgcaccgcgctggattccgtctctttataacggcgctccatattatgcagcacgccttcgaacggatggcggcgcacggaagtatcgccgcgatcgttcatatatttaaattcaatgttctctttgccggaaccgtacagcacgactttatgtacgttggcgctgaggcttgcccacggcgcatccacgtcgaacttatagtgttccgccagcgacttgagcatttgaaagtaataaaaattgcgacgatcccaaccacgaatcgcgccgcctgccagcgacaggtcgggattctggatcacgcggtccggatcgaaatattgctgaacgccgagcccgtcacaggtcgggcaggcgcctgccgggttgttgaacgagaacagacgcggttccagttcgcgcatactgtagccgcaaatcggacaggcaaaattggcggagaacagaagctcctccgctttctcatcgtccatatcggcaacaaccgccgtgccgccggataattccagcgccgtttcgaacgactccgccaggcgttgggaaagatcgttgcgaactttgaagcgatcgatcaccacctcaatggtatgtttcttttgtagctccagcttcggcggatcggagagatcgcagacttcgccgtcaatacgggcgcgaatgtaaccctggcttgccagattttccagcgttttggtgtgttcgcctttacgctctttaataatcggcgcgagcagcatcagacgtttgccttccggctgtgacagcacgttatcgaccatctggctaacggtttgcgccgccagcggcacgtcatgatccggacaacgcggctcgcccacgcgggcaaacagcaggcgcaggtagtcgtggatctcggtaatagtacccaccgtagagcgcgggttgtgcgatgtcgatttctgttcaattgagatcgcgggcgatagcccctcaatatggtcgacatccggtttttccatgagcgacaaaaactgccgcgcgtaagcggagagcgattcaacgtaacgacgctgcccttcggcatacagagtgtcgaaagccagtgaggatttgcctgaacccgaaagcccggtcacgacaatcagtttgtcgcgggggatgacgaggttaatatttttgagattatgggtgcgggcgccccgaacttcgatcttatccattcacctttcccggtagagactcggatgcctggtttgtttgaaggacaaacggcagaaacggctaattatgacacaatttaacctgtttgaatatacagtattggaatgcatcttcagctaaagtatgcaacaatatgaggttcgcgcgagtgacctggaacctgcatcgcagctattaaaatgctacgtggaaatggtacactcacgcgtttacactatttatgaaacgtattcaggagactcaattatggccagcagaggcgtaaacaaggtgattctcgttggtaatctgggccaggacccggaagtacgctatatgccgagtggcggcgctgtcgccaacttaacgctggctacttctgaatcctggcgcgataagcagaccggcgaaatgaaagagcagactgaatggcaccgggtggtgatgttcggcaaactggcggaagtggccggcgaatatctgcgtaaaggttctcaggtgtatatcgaaggtcaattgcgtacccgcaagtggaccgatcagagtggccaggaacgctatacgactgaaattaacgttccgcagatcggcggcgtgatgcagatgctgggtggtcgccagggcggcggcgcgccggcaggcggtcagcagcaggggggttggggtcagccacaacaacctcagcagccgcagggcggcaaccagttcagcggcggcgcgcagtcgcgtccacagcaatccgcgccagcgccgtctaacgaaccgccaatggattttgacgacgacattccgttctgatttttggtaaaaaagtcaaagcgttatttgcattttcgctatagctctcgtctgctgaaatgcctggtgtaaaccaggcattttcttacctggtattattgtctttgtatccctttcaaaaaagagaagcgcatatcttacggaaaaatgtcgcttatcgcctctggccgactcgcctcggcacatcattatccagccgaagttcataaatgtactgcaataacccggattgtcttaaatatgaaagagaaaactcatctgcaaaatatataatttatagccattttttgacaacaaaaagatattataaaataacgttagagaatggtcggtattatcaatggttaattaaatgtttgctttagcttgtgatgagctcaaatatgatatgtgcatcttgctttatttttaattgctgaagataaagttgttacttatagctggctttatataaaaaatggttttatttgtgtgtgtttttacgcaattctgattttttactccccacttattatattgttaatgatttaagttatattgaagtccctatgaccctatgttttaattgtgaaaattaattttatcctctggaggcaaatttattaaatacgtatggttataacgcgtattaaaaagaaatatgtccttaaaatgatttagagtttcaatgattagctaacaaatctatttatcggtgggtggttttaatttgctgatgactattttttatttatgagttgagagcttatgcgatacctattattggggaagatatagttagtgcaataattgatgtctacctaattaaaaaaatgaagagtgtttttaattaaagcactcatctttgttgtgggcgcataaaaatggcgtcgttgtttttatttttctgattacgagatgtaggaaaactgaaatctataaagcgtattggtagcaggaagccaagggcggtagcgttcactttctgaataagttgagcatcctttatcctttctaatccacaaaaacattttattcacaatgtaatatcaggagacaacatggaagacgaaagtaatccgtggcctagttttgttgatacattctctacggtattgtgtatttttatatttcttatgttggtgtttgcacttaataatatgattattatgtatgacaactcaattaaagtttataaagcaaatatagagaataagactaaatctactgctcaaaatagcggagccaatgacaattcaaatgataatgaaatagttaataaagaagtgaatactcaagatgtgtcggacggaatgactacaatgtcaggtaaggaggttggagtatacgatatcgccgatggtcagaaaattgatataacatctacaaaaaatgagcttgttattacgtatcatggcaggctgagaagcttttctgaagaggatactcataaaatagaggcttggttagaagacaaaatcaatagtaatttattgatagaaatggttattcctcaggcagacatctctttctctgactctttacgactgggatatgaacggggaattattttaatgaaagagattaagaagatatatcctgatgtagttattgacatgagtgttaactccgcagcatcaagtacaacgagtaaagctattatcacgactattaataaaaaggtgtcagagtgaaatatataaatcattaccgctatttgtttgtctgttttttccttgctatactcccttttttcgctttatcttttcccggtataagagagtatgtttttgataactttatggtttctgcaatttacaatggggtcattattgccatttatattacaggttctttgtgtgcattattcactattcttaaaaatatttcagcaaaagacatattaatagctcaggacgccagtagaaaaaatagcattctttctaacctcaatcaggttttgtttgccggggaacccaaacagtgtgatttcaatttgctgatggaattagatgacaatgtgtctaccgcccgtaatcaacgattgtcatttattatgagctgtagcaatgtgtcgacgcttgttggcctgttggggacgtttgcgggtctgtctattacgattggttcaatcgggaacttattgagctcgccatcagatgttggcggtgataatgcaagtaatacactcaatatgatcgtgacaatggtagcgtcgctttctgaaccattgaaagggatgaataccgcatttgtatcttctatctatggtgttgtttgcgccatactcctgacctcacaaagtgtttttgttcgcagctcctattcccttgtttctacggaaatcaaaaaattaaaaatcataagcaacagatccaataataaacaacgaagcctgcgggttgaatcagagacgcttgtagaatttaaagagttgtttaaagcgttttttgataactacctgacagttgaaaacttacggacgcaggatgaagaaaagaaacgagtgatgctatcagatagctttgtcactttgcaaaaccgactattggataactcagcaaaactggaacaactttctacgctgattgatggttatctggtaagcaataacgaaaataccaaaaaattagttgacggtgtaataacaattacctctcgtttatctgaaggtaataccctgcttgctgataataatgcacgactggaggcaatgagtacaatacaaaatattatagataaaaagaatgattcaataatgacatcagttgataaatgttatcaggaatctctttcacatggtaagaccataaacgatattgccgctggcagtgccgatatttctcatactctcgatgggctgagaaaagaaatggatgaggatatgaataatgttcatttagcgctatccgatctatcggctactgataaaaagattattgccaatactaaagagattagtgctgaaatggttagctaccgtgatacctatatgccattaatggaaaaaataacatctatgcatcaggaaatagtaaagcaacgtttgttaaacaaggaggaaaaaaatgaagattaagatgttttttctgacgactgcttttattacacaaagcacatacgccagcgagcttccggtcattcctctaagagatttagttaatgccgcattaacgcatcagccctctgttgctgtttcatattatgagactgaaaagaaaaacagtgacttagatctttcacgggcagcactttatcctaccctggatctaacatctggccttaataataacaggaaagagtcatcaggtaccgagaggaacgttgaaaataaggtgtctttatcataccgaataacggattttggagtgaggggggctaatatcaggaaatctgaatatgaaagagataatagtaaaactgactatgaaaaaacaaagaatatagtgtctcaggaggttgtgacaacctattacaacatcagtaaatatcgtgaaatgattgatggcgtaaatctggagaaagagttttataaaaagatgctggaaactttttcgttgctggtatcttccggtgtagctatgcaatctgatatgcgtaaagtacaagtatctatcgatgcattaaataccagaagcattatgtatcagtcgatgttggatgatgaaatgtataaaatgcagaatatgactggtctgaatttatcgccagttcagattcaaagcgatgaaaaattcaacctcttcaaaaaatatatctttgtcgaaagccctgaaaaacttatggacatggtgatgaaatacaacgatgactataagatgcttgtcaatacccgaaaagccgcgaccgaagatattaatgccgcaaaatcatcctattttccgactgtagatcttgtttccagctatgtacagaataacccgagcggtagtgccaaaaaaagtgattatgaagatgaatttaaaacgggtatcaatgtcagtttcaacatttttaatgggttcagaaattcagcccaggaaagaaaaatggtggcaagttattcgcaggctaagctgcaaattgacgattttttgattaaaacgcgttataacattgattcacaactttcaagatacgccgctgcaaaagagacttactcagtggcggaacgttcacatacaaacgcgttacagcttactgaattatatgagcaggagtttcagttagggcaaaaaagtttgcttgatttaatttcaagccgtaatgaagcatttcaggcatatgtaagcatgatcgacagcaaatatagcctgtatattttaaagctacagcaactctcattgatttttcatttaatggattatttaaaaggaaatactgaaagtgagttaaatgtaatgaaatgaatagaagacaaagcgatcatctcatgatgataattatttctttgacgatcttaattattatccttacctactttatagaaattaattcagtggttcatggtcagggcgttatcactactaaagataatgctcagttaatatctctttctaaaggagggacgatacaagatatttatgtagccgagggtgatactgtaaaaaaaggagaactccttgcaaaggtcgttaaccttgatctgcaaaaagaatatcaaaggtatagaactcaaaaagggtatctggataaagatgttaacgaaatatctttcattcttgataaagaaaatgagagtgggttgattaccctggatggcacccgttctttaagcaataaagaggtaaaagcgaatattgaattagtgcatagtcagataagagctaaagagttaaaaaaaacctctcttgattctgagattagcggattacaagagaagctgagttcgaaagaaaaagaactcgcattgcttgccgaagaaataaatattctttccccactggtaaaaaaaggaattagcccatataccaattttcttaacaagaaacaggcgtatataaaagttaagtctgaaattaatgatattgaaagtagcatcactttaaaaaaagatgatattgagttggttgttaatgatattgaggcgcttaataatgaattgcgactatctttatctaaaataatatctaaaaatcttcaggaacttgaggttgttaactctacattaaaagtaatagagaagcagataaatgaggaggatatctattcaccggttgacggtgtaatttataaaatcaataaaagtgccactactcatggtggtgtgattcaggcggcggacttactttttgaaataaaaccaaaagtaaggactatgctggccgatgtgaaaatattacccaaataccgtgaccaaatatatgtagatgaagccgttaaactggatgtgcagtcaattatccaaccaaagataaaatcgtataatgcgactatcgataatattagccctgattcctatgaggaaaataccggaggaacaattcagcgttattataaagtaattattgcattcgatgttaatgaagatgatttacggtggttaaaaccaggtatgactgttgacgccagtgtaattaccggaaaacacagcattatggaatacctgttatctcccttgatgaaaggcgtggacaaagccttttcagaaccagttaatactaaacgattagatacaccttgagagtgaatataatattatgggaaataaaagcatacaaaagttttttgccgatcaaaattctgtaattgatttatcttctttgggtaatgccaaaggcgcaaaagtttctctttccgggccagacatgaacattaccacgccgcgtggttcagtgatcattgtcaatggcgctctttattcaagtatcaaaggcaataacctcgctgttaaatttaaagataagactattaccggcgctaaaattctgggcagcgtagatttaaaagatattcaactggagagaattgacagctcattggttgattctgctcaggtagaaaagaaaggtaatggcaaacgacgaaataagaaggaagaagaggaattaaaaaagcagcttgacgatgctgaaaacgcaaagaaagaagctgataaggcgaaggaagaagcagagaaagctaaggaggctgcagaaaaagcgctcaatgaagcgtttgaagtacagaactcgtcaaagcaaattgaagaaatgctgcagaactttttggctgacaatgtagcaaaagacaatctggctcagcaaagcgatgcttcccagcaaaatacacaggctaaagcaacgcaggcttctaaacagaacgatgctgaaaaagttcttcctcaacctattaataaaaataccagtactggcaaaagtaatagcagtaaaaatgaggaaaataagctcgatgccgagtctgttaaagagccgcttaaagtcacattagcgcttgcggccgagagtaacagcggtagcaaagatgatagtataactaattttaccaaacctcagtttgtaggtagcactgctcccaatgccacggttattattaaaattaatggtattgctgtcggtcaggctgtagcggatagtttgggtaacttcacctttacagcgcctgaaacattgactgatggagcatataatctggaggcagaggccaagactgctgatgggagcggtagcgccaaacttgtcattactatcgattccgttaccgataaaccaacatttgaactttcgcctgaaagtagtgtgtccggtcataagggcttaacgccgaccttgacgccttcaattgttggtacggcggaagagaatgctaaggttgacatttatgtagataataaactggttgccagcgttgatgtcgataaagatggaaactggagttatgaatttaaggataatgaattatctgagggcgaaaatagtataaaagtcgttgctgtagataaagcaggtaataaaaacgaaacgacggatagtatcataaccgacaccattcctccggaaaagccgacgattgagctggatgatagtagtgattccggcattaaaaatgacaacattacaaatagcaccctgccaacatttattggtgtggcggaacccggttctacagtctctatttatcttggacttaaacatcttggtgaggtcattgttgctaaagatgggacatggagctatacgcttactacgccgctcaaggatggcgaatacaatataacagcaacagctactgatattgccgggcatacctcagcgacggcaaatctgccttttactattgatacacgtatcagctatttcagcgctgagattgaaacgacgaatgatagcggtattgtcggagataacgttactaacaatactcgcccaacctttacaggtaaaactgagccaaatgctattatcagtgtcataaatagtgagactggcgaagaggttatttttaaagcgaatgacaagggcgaatggacgttcaatttcacttccgactcagtggaagggattaacaatcttacgttcactgttgaagatgtcgctggcaacaaaaaggatttttcctttagttacgttatcgatactattgcccctgtacctccgacggtttctttggaggactttgttgttttaccgaatggtataattttatcagggaatgatttaccggctttagtcggtacggcagagccaaagtctaccatcttattgatgcgagatggtaaattatatgacagcattgaggttgactcaaacgggacctggaattatcagtttagtaataaatttcttcagggcgcctatgatattgaaatcatctctcaggatgccgccggtaataaatcctctactgttaaatattcttttactattcaaactgaagttgtacctccaaaagcggaactcgatgccagtgatgattccggtgcaaaaggcgactggattaccaataaacataatgctctgacattactgggaacagctgataggtttgctaccgtaaatatccttatcgatggtaaaacgataggcgtgacgactgcggatgcagacggtaactggaattttgatatttcccgaaatctgtctgacaatgtttataagattacggttgaatccatcgatcctttaggaagaacgtcatctgtagattatcagcttaccattgatagctttacgccgatccctactgttatgttgcatgatagcgctgattctggcgttaaaggcgatatgattactaaaattaatacgccgttgtttaccgggatggctgaagctaatgctaaggtttccatctatgttgacggtgtgttaagtggtgaggctattgctggcgatgatggtgtatggaattttcaatttaccacagcgttatccgatggctcgcatgacgtaacggtaaaagtagaagatattgccggtaatactgcctcctcatcagcgtataatttccaaatcgtaacgcaaacgcaaaaaccaacaatagagttggtcaacgatacgggggttgataatacagaccatattattaatgaaaagaatcctgcactgacaggaaccgctgcaccctattcaacggttaaactctatattgatggcgcactgatcgctgaggtcagaacaaataaagatggcagatgggagtataccctgaaagccgatcaaggtttggttgatggcgatcatagaataaccgcttcagttgaagatatcgctggcaacattgcccattcggatcctttcttaattagcgtcgatactgctatttcaataccgatagtttcattgagcccggattcagattcgggaattgcagatgataatttaacgaatatcgttaaacctaccttgcacctaaaagatattgatccggacattatcagtgttcaggtatgggatgccatgtctgatacgcagatcggtgttgccacgcaacaacctgatggttcatgggcctatacctttacttcagatttaacggaaggcttgcatcaggtttatgtcaaggttgaggacattgcgggtaataaagcgaacagtgcggtattcgattttactatcgataccacagtatcaacgccggtgatttccctgctttctaaggatgatacgggggttacaggcgataacctgaccaatatcaataagccaggttttgctatttccggtgttgatgccgatgcgcatcgggtcgtcgtacaggtgatgcataatggcgtgagcgaagagatcgaactttcccacctcaatggtagttggttatttacaccagggaatacgtgggcggatggcagctacacgttaacggtgaaagtagaagataaggcaggaaataccagctattcagcgccgctgacggtcgttatcgatacccaaatcgccattgatggggtggaactggtcaacgatagcggtgtgaaaggcgacaatatgaccaacgacgaccgtccccactttcgtgtgacggtacctacggatgtcaatgaagtccgtctgagcattgacggtggtaattcgtgggttcaggcaaccccgggcgtggcaggcagctgggagtatatctggccgacagacctggcagatggtcaatacacgctaacggtggaggcgactgataaagcaggcaataccgtgacgaagaccatcgatttcgcggtggataccacgctgtcagtgccggtcatcgtactgaatagcgcggacgataccggtgtccagggcgataacatgacgaatcgcacccagccgacatttgccctgcagcatattgatgatgatgccgttcgcgttacggtcagcgtggagcatggcggcgtcaccaccacatttgacgccacgaaaggcacaggcggatggacctttacgccgccgacatcatgggcggatggtgattataccctgagtgtgtcagtcgaagataaagcggggaacaccagccattctgcatcgctgacggtgacggtggacacgcaaatcgccattaataacattgaactggtcaatgacagcggtattcccgacgataatctgactaataacgtgcgtccgcacttccaggtgacggtaccgacggatgtcaacgtggtgcgcctgagcattgacggcggcaagacgtggttcaacgctacccagagcgcgacgccgggcgcctgggattatatctggccggatgatgtggccgacggaggctataccctgacggtagaggcgaccgacaaggcgggaaacaagacgacgcaggaacttgatttcaccatcgataccactctgtctgtgccgaccctctcgctggacagcgcagatgacagcggcatcgcgggcgataatatcaccaatgttaaaacgccgggctttaccctcaacaatattgataccgatgtcagccgggtgatagtggaggtaatgcacaatggcattaaacaggaggtgccactggttcagaccggcggacagtggcgctttgcgccgaccagcgactgggcggacggcgactatatcctgacggtgaaggtagaagatagggccggaaatgtgaagcagtccgcgccgttgacggtgacagtagatacgcatatcgccattgaccgtattgaactggttaacgacagcggtatccccggcgataatctgaccaatgaagcgcgcccgcactttcaggtgacagtaccggcggatgttaacggtgtaagactgagtattgatggcggcaaaacgtggtttgacgccacgcagagcgcgacgtcgggcgtctgggattacacctggctgacgaatgtggctaacggccctcacaccctgatggtggaagcgtccgacaaggcgggaaacaaaacgacgcagaaactggacttcatcatcgataccctgctgtcagaaccgactattaccctggacagcgcggatgatagcgccgctggcgataacatcaccaacgttaagatgccaggctttaccctcggtaatatcgacgccgacgtgaccaaagtggtggtgacggtggcgcatgatggtaagaaccaacagatagagttgattaagaacggcggtgtgtggcgctttacgccgggcgcagcctggaccgatggcgactatacgttgacggtaaaggtagaagataaggcgggtaatacaaattattctgcgccgctgacggtgactatcgatacgcaaacgtctattgatcgcattgagcttcttaatgacacgggtattgtcggggataacctgaccaatgaagcacgtccacagtttcatattacggtaccgacggacgtgaactctgtgcaactgagtcttgatggcggcatcaactgggttaacgcaacgctgacgtctgacggcgtttgggagtatatatggccgacagatctggtcgaaaatacgtataccctgacagtgaaagcaaccgatgttgcaggcaacacggcgacggaaacgctcaattttatcattgataccacattgtcgacaccgaccatcacgctggatagcgcagatgatagcggcaccgccaacgataataagactaacgttaaaacgccgggttttattatcggcggtattgattctgacgtgactcaggtcgtcgtgcaggtgatgcgcgatggtcacagcgaggaggtggagctgacgcagactaacgggcagtggcgttttgtacccggcagcgcgtggactgatggcgactatacgctgacggtaacggtgaaagatgaggcgggtaatattcgccactcagcgccgttgacggtcaccatcgatacgcaaatcaccattgaccatattgaactggtcaatgacagcggtattcccgacgataatctgactaataatgtgcgtccgcacttccaggtgacggtaccgacggatgtcaacgtggtgcgcctgagcattgacggcggtaagacgtggttcaacgctacccagagcgcgacgccgggcgtctgggattatacctggctggctgatgtgggagagggtaagcataccctgacagtggaggcgaccgacaaggcgggaaacaaaacgacgcagcaactggacttcatcatcgataccctactgtcagaaccgactatcgtgctggacagcacggacgacagcggaacaaaaggcgataacctgaccaacgtaaataagccgacgtttttactgggcaatattgacgcagacgcgcggtatgtcacggttgaggtacagcatggcggcacgaaagaggtgctgacggccaccaaagacgcgaccggcaactggagcgtaacaccgaccggcacatgggcagatggcgactatacgctgacagtgagggtggaagatgaggcggggaacgaaaaacactcagcgtcgctaacggtcactgttgatacccaaatcaccattgatgttattgaactggttaatgataacggtattcccggcgacaatatgactaacgacgcccatccgcagttccgcgtgacggtaccgggggacgttaacgaagttagtctgagcattgacggtggcgtgacctgggttaaggcgacacagagcgcgacgccgggcgtctggaattatacctggccgggcaccgtgccggatggcgactatacgctgaatgtgaaagcgactgacaatgcgggtaatacggtgacggagacactccacttcactattgataccacgctgtcagtgccggtcatcgtactgaatagcgcggacgataccggtgtccagggcgataacatgacgaatagcacccagccgacatttgccctgcagcatattgatgatgatgccgttcgcgttacggtcagcgtggagcatggcggcgtcaccaccacatttgacgccacgaaaggcgtaggcggatggagctttacgccgacaggggcgtgggcggatggtgattataccctgagtgtgtcagtcgaagataaagcggggaacaccagccattctgcatcgttgacggtgacggtggacacgcaaatcgccattaataacattgaactggtcaatgacagcggtattcccgacgataatctgactaataacgtgcgtccgcacttccaggtgaaggtaccgacggatgttaacgaggtacgcctgagcattgacggcggcaagacgtggttcaacgctacccagagcgcgacgccgggcgtctgggattatacctggctggctgatgtgggagaggggaagcataccctgacagtggaggcgaccgacaaggcgggaaaccagacgacgcagaaactggacttcatcatcgataccatgctgtcagaaccgactatcgtgctggacagcacggacgacagcggaacaaaaggcgataacctgaccaacgcgaataagccgacgtttatactgggcaatattgacgcagacgcgcggtatgtcacggttgaggtgcagtatggcggcacgaaagaagtgctgacggccaccaaaggcgcgaccggcatctggagcgtgacaccgaccggcacatgggcagatggcgactatacgctgacggtgagggtggaggatgatgcggggaacgtaaaatactcagcgccgctgacggtcacggttgatacccaaatcaccattgatgttattgaactggttaatgataacggtattcccggcgacaacctgaccaatgacgttcgtccacacttccgcgtcacggtgccaggggatgtcaacgaggtacgtctgagtatcgacggcggtaatacgtgggttcgtgcaacacagggcacggcagggatctgggattacacctggccgaaagatgtgaccgacgggctacataccctgacggtagaagcgaccgataaggcgggaaataagacgacgcagacgctcgattttaccattgatacccggctgtcaacgcctaccatcactatggatagcagggacgatacaggtgccattggcgatcatattacgagcgtcaaaagaccgggctttaccattggcaatattgactccgatgcgcaatcggtcattttgcggatcacacagggcggcaatagccaggaagtgacactaacccaggttggaggacagtggcgctttacgccagatgctgactgggcggacggtagctatacactgacggtagaggtaacggataacgcaggaaacgttcgtcagtccacgccgctgatagtgacggtagatacgcaaaccagcattactgatattacattggtcaatgatcatggcgtgcctgatgacaatctaactaacagcacccgtccgcagtttgagatcacggtgccggcggatgtgaattctgtgcaactgagcattgatgggggcgcaaactgggtgagcgcggcgcagggtattgaaggcgtctggggctatacctggccaacggatatgggcgatggaaaacacaccctaaccgtcatggtcaccaacagagcgggcaatacggcgacgcaaacgcttgaatttttcatcgacacccggttgtcgacgccgactattgcgctggatagcacggatgataccggtacgcctggcgatgatatgaccaatcgcacccgaccgacctttattctgcagaatatcgattcggatgttatcaacgttacagtcagcgtcacgcataatggaacgacaacctcgtttaccgcgacacagggggctggaggctggagctttacaccgccagcgccgtggggcgacggtgattatacgctgacggtgacagtggaggatcgggcgggaaatacgcgtccgtctacgccgctgacggtgacagtggatacgcaaatagccattgatcatattgaattagtcaacgatagcggcgtccctggcgataatgtgacaaaacatgtgcgtccgcagttccagatctcggtaccggatgatgtggaaaaggttcttctgagtattgacggcggcacgacctgggttaccgcaatcaagagttcgacggctggcatttgggattacacctggccgacggatatgccagagggacagcataccctgaccgtggaagtgactgacggtgcgggtaataagatgacggagacgctcaatttcactatcgacatcacgttgatgacgccaaccattgagctggcgcccgatcaggataccggacagaataagaacgataatctgaccagcgtcactcagccagtatttgtgttggggagtatcgataaagatgttcgacacgtggaattgagtattgagcataacggcacgtttaaaacggtggtactcaccgaatcagccgacggctggcgctatcgaccggattctgctttggcggacggtagctacacattcaccgtgacggtaacagatgtggcaggcaaccagcaaacatccgcgcctttaaaggtgacgatagacggtacgttgactacgccggtgattgaactggcagctggcgaagatagcggtactgttggcgatcgcctcaccaatcacgatcggcctgtgttcgacatacgccaggttgattctgacgttacgcgcgtgatggtcaaagtaacttacaacggtaaaacgcacgaggaagcggcggtattcaccaatggtcaatggcgctttacgccttctgcgagctgggctgatggctcatatcagttagccgttgtggtggaagatctggcggggaatgtaaaagagtctgcgccgtttgaggtgcgtattgacaccacgacaaccattaacaatatcgtattgcttaatgatactggcgtgcagaatgatcaattaacgaatgttgccaaaccgtcattcagaattgacgttcccggtgatgtcgtccaggtacgcgtaaccctggatggtggcgctaactggaatgtgatacgcaaaaatgccgacggacagtggatttttgacagcccgaatactctggttgacggcacatatacccttcgcgtagaggccacggatgaggcaggtaatattgcgaataaagatttagtatttaatatcgatactaatatacaggttccgactattgctttagacgcaggacaagataccggagcgaatacagccgataatatcactaatatttcacgacccacctttacgattggtaatgttgaccccgatgttatcaaagtcgtggtgacgattgatggtcatgattataacgcgactaaggttggggctggttggcaatttacgccaggcaatgccattccggatggttcttataatattaccgttacggttgaagataaggccggaaataccgcgacatcgaaaccattacctgttgtgatagatacgacggctgaaattgaaagcgtcacgttggttacagatagcggtgatagcgatgtagataacattaccaaagtcgacaagccgcagtttagtattgttaccgctgatgatattactcatgtgcgcgttaaaatcgataacgccgctaattggattgaactcacaaaaggaggggatggccgctggatatttaatgtcggttcggcattacctgatgggcaacacactctcttggttgatgtgactgatatcgccggcaacgttgcgcaagaaacgctgcagtttacgattgatacgactctgcgagagccgacaattgtactcgatcccacccatgatactggtgatgatactaatgataatcttaccaggattaacaaaccggtgtttattatcggtaatgtcgataatgatgtatcacacattgtggttcatattgatggtcgggattacaccattgaaaacacaggggggaatttaacctttacgccggatcaaccgctgtctgacggtcagcatacgatctctgttaccgtaacggatattgctggtaataccaaaacatcggccgaactgaagattgaaatcgacacgcaggttcagattgacagtgttacgttaacaacagatagcggcgtcaacgatcacgataatgtcaccaatgctacccgtccctcttttgaaattgcaacgcctgatgatgtgacatcggtgctggtttctttcgatggcgtaaactggacgcccatcagtaaaaatgcggccgggcagtgggaatttactgcaggtagcgcattgcctgatggtcattatactctccatgtccaggcgacggatcgggcagggaatacggcaaattccacgctgggcttcaccgtggatacgcagattgacggcctgagcgtcgtgatgctggacgacgccggaaaggattctacggatggtattacgaatattacctctccacgttttgaaatttcagccagagaaccgctgcagagcgtgacggtaattttaaacgggaaatccagcacactgactcagggggcaggtaataaatggctgtttacccctgatacaccgttagtggatggaacttacaaaatagaaatagtggctgaagatatcgcaggtaataaaattagcaaagaggtatcattcacaatagacactattgtttctgatcccagtattgatttgctggatgcggatgatactggcgaaagcgctgttgataatattacgagtgtcactaaaccacgtttcgttattggcaatgtacccgccgatattgatactgttgtaatcagaattaacggcgtttcttatccggttacggcaaatggcaataacctctgggaattccaggttcccgttgcgttaaacgatggcgtatatgaagccgttgttgtcttcagagatattgccggaaatacttctgaaactaagctgccctttaccattgataccacgacaagcgtcagtgtcagaatggagccagcgtctgataccggaaattccaatagcgataaccttacgaataagcaaaatcccaaattcgaaggtactgcagagcccaatgcgaaactggtgattaccattgttgacgataagtcaggtcgggaggttttaaaacaaacgattacggttggcgctgatggcaactggagtgtgacgccgaatatactgccggatggcatgtataccatcaacgtcgtcgcaacagatgtcgcgggaaatactgcgcaaacgcaggaaagattcactatcgatacggttacgatcgatcccaccattcgcctttcggatccatctattgatgatcagcatgaagcaaccagcctgcgtcctgagttcaaagggtttgccgaagcgttctcgacgattatgattcagtgggatgggaaagtggtcggctcggcaaacgccaatgcgaatggcgaatggagttggacgccgccatcagtattagcgccaggctcctatgttgtgagcattgttgccaaagataaagcgggtaatgaatcgtcgcaggtcgactttcctgtcgtaatacctgttattgatgtcacgcctccaaccataaagctcagcgaggagagcgatagtggtgccttaggagactttaccacgaataataaaacgccgaccctggttgggaacacgttacctaatgcgattgtgagtatttatgtggatggcgtgaaggtcggcgaggcgacagcggatacagcgggtcgatatactttccagttatcggaaatgaaagatggccattatgtcgtccaggtgggtatagtcaaccctcgcgataatagcgaactgcgttccaccgccgttgatgtcactatcgataccgaggttgctgaactggtatggaatatatctggaatgcatgagggcggatatatcaatacggtgacgccggagattggcggcaccagtgagccaaacagcaaaatcactatctttgtgaatggcgttgaaaaagcgattgcttatacgacaggcgcaggacactggggcgtagtattacctgctttgggtaatgacggtaattatgtattaacgtttaaagttgaagatgttgccggcaatatcagagagtttggtccgcagaatgtgatactggatacggtaatttcgccgttaaccgtggtattacgcgaagctgatgacagtggcaaagttggcgactggatcaccaataaatctcatgtcaccatcgatggtactgccgaagccggaagtactttaaccatcaggagtccgcagggggtggttattgctaccctggtggtaggcaatgatggtcgatggagcgcagaattagatctgcgtgaaggtagtaatgcctttgtcgtggtatcggaagataaagcgggcaacagccaacaaaaagatatcctgatagaacatgatacgcagattgaaatcagcgatatttcattaagtcgggatactaatagcggtgataaatatgatctgattaccaataataagtctccggtactggttgccatgaccgatcccggcgcgacggtacaggtttatattaatggtgtgttacaaggcacagtagaggcgagttcgtcaggtaatattagctataccatgccggcaaatagcgccgacggcgagtatcaggtgcaatttgttgctacggatactgctggtaaccgggttgagtctgcgattacaaccgtgacaatcgattctcaaattgctgtctttgacattgatgaagattcattaccggccctctctaataaccgggcgttgtcagtctcaggtgtcggggaggctggttctcaggtcagcatctttgtcgatggtaaattagtcaacgttgttatggttgaggctgatggcacatggcgcgcgccgatactgctgcaagatgatggtacgtttaatattcatttcagcattactgacgttgctggcaacactgaagtgagcaaggattatagcgtggatgtcgattcatcaaccgacttcccaacgctcaaccttgaagatgcaagcaactctggttcacttgacgatctgattactaatcacaacaagcctgtgttagttggcaccgcagaagcgggagccacaatccatatttatgtggatgaaaagatcgtggcaaatgtgcttgtgcttgaagatggaacctggtcctaccagtttgataatgtgttaaaagatggtgaatattctatccgtgtggttgccgaagacccggcaggtaatacggcagaatcgcctcgcttactcgtcacgatagataccagtacgtttatcgataatcctgctatggtggcaggttctgataacggtattttcagtaatgatagtataacgagtcagacccggcctacgtttagtatttctggagaaatgaaccagagtgttcagattttcattgatggggtgttagtcgatacgatcacggtgacggacagaaatcaagtttatcgacctgagtcaccgttgggcgatggttcccatagcatttattatgttatcaccgataaagcaggcaacacggctacctcgaaaacgctaaactttactatcgatacctttaatacgacgcctgtcgccattgattctatcggtggacaaacgttagcagagatgaccggtagtgatggcaaaatatatataacggacacgacgcgtaacttattgtttagtggcagtgccgagcccaatagcaaaatagaaatcatcattaatggcttaaatgtgggggaagtttgggttaatgaaaaaggccactggcagatgccggtgaacccgctttatttcacagaaggccaactggatatcactgttaaatctacggaccgtgctggtaacgtaaatcaggaaaagtattccatttgggtcgatacgcatatccaggtatttaccagcgagcttgatgacaataaatcatcatcgaaaacggactggtggagtaatagctccactattaccatgagaggtatgggggaaattggcgctacggtatcattaatcgtggcaggggtcacgttggcaaccgctgtcgttgcggctaatgggcagtgggaattatcgaccgatcagcttccggaaggtaaatacgatatcacgttgagtattgaggataacgcaggcaaccgtaaggaagaggtacatgaaatatttattgatcgaacgccgccaaacgctccggtcgtaacttattcagatattgtcaacgatctaattattatgcaggggacggcggaagccaaatctcagctaataataaccgatagtaatgggaatacttatacgttaaccgttcctgataatggtaaatggagtatggctatcccgtatccatcggaagggaagtttaccattacgagtgtggatgcgattggtaaccggagtgatgatgtctctctcgatatcatgaaagaggttcccgttatttcattatctccagactcagacagtggtacggtgggcgataatattacgcgagataagcaacctacctttattatcgggaatctggaaagcgatgttgtggtcgttcaggtcgatatcaatgggaccgtatataatgctgaaaaaaatgccgatggcgtttggttctttacgccaggtacaccgttagctgatggttcctatacgatatcggtaatcgcaagcgatgccgcgggtaatcagaaaaactcgttacccattaccgttacgatcgacagtacgctgacggtgccggagattgcgttggcagcaggtgaagacaatggcgtttcagacagcgataacgtgacgaatcacacccagcctaagttcacgctgcagcatattgatgctgatgtgaccggggtgaccgtaaacgtgacgcataacggcgtgacagacacctatcaggcgacgcaaggcgcggatggctggaccttcacgccgccagccgcctggaatgatggtacctacacgctgagcgtgacggtggtggatcgcgcggggaactcacagcaatctgcttcgctagcggtgacggttgactcaacggtgacggtaacagcggatagccagcatgacgatgcgagcgatgacgccacggcaacagcggttactccaccggagtctgaaacagtgaatgccgaaagcgctacgcatcttcgtacagtgccgtctgcggcggaagaaagcgtggtgaaggagacagcctatagtattacattgttaaacgctgactctggggatgaaatagatcgttcaattagtcagacaccttcttttgaaatatcagtacctgagaatattgttaatgtcagtattatgtttgaaggagaagagtttactctgccgataactaaccagaaagcaatattcgaagttccgctatctttggaagatggtgaatatactatggacgtgaaattcattgataaagacaatgatttcctgattaaggagaaaacattctcagtcgatcactcctcggcggatattgtgaacgcaatgaatgcaagaggaaagaccgaggatgatattaatgattccccttccacgagttctgtagggcacaacaataacggcgctattgatgttttcgccgttaatgaagttacgctacctgtagataatcaagaagaacacgcataataacggaggcccctcacctttgggtgagggggtttacttatggataaaaaactagaaccttattatttaagtgcggaaacggcattatctatagtgtctaaaaaattcaacataaaaattgatatcaaagaggatgatataaatttaagatttaaaaagtacgacagaaataacactgatgactctatacaaatgaagaatttctttttgtcgttagggctttctctacaggatatattatttaataatggtgaggatttactaaatgagcctatgccgattttactattaacaccagaaatgaagtggatggtgtgtgtgagtggcgggcaaaaaataaagttggtaaacgcgcgcggtgaactctgttatgttgaaattgaagatgaatatttaaaagagttatctgcatttagtatactacctttaaataaagttgttgatagtataagagtaaaaaatatcataaaaaactctttatcgatgaacaagattttttatactaaatactttttttcatctctttttatggcaatttttgcgttaactatcccagtatttagtaatctgttctatgataagcttgttccaagcgcttcggtttcatctttatttggcgtggctataattgttgctgtatttattgtttttgagtttatccttcgtacttcgaaagatatttatcagtctatcacagcaaggcaggatgacgtcgatattgatatcgcatttcttgaagcggtactttatagtaaaaagaaaaatggcagatccatgtcatcagcatttgtgctatggaatgagtttcagaaaattaaacccgttttattaaactcgatctttcaacgtatagccgatattccaatatttattatatttctcattgttatatatgtaaatttaggtctggttgttattgtacctattaccatgtttatcgtctctattattatttccctcgttaaccaccattatactaatgagttaatgaacaaacaaaaagaaggacagaagaacaggaatatttttatctcagaagttttcttatctattaaaatgatccataccttaaataatcaaggtttactttttgattgggttaatacgtcaaatgaacagtcgtatcttaacctgaagataaggaaattaaatcttatctatcaatctatattggggagtatgtcatctattacccaaataactattatggtaatagccttttttatggtaatcaagggtgatgttactactggcgcaattgtttcatctgtcattgtctctggccgtatttccgggatcatttcgaatttttcttctacattaatctctattttatcagcagaaaaaaccggtaaggatctgctttctttttttgatgaagatcaggcagaaaaaacaccggcattacagtcaatatcaaagtgcaatggcgatatctctatccggggcgtgagttatcagtatgatgctcaatctccgatgattattaaccgactgtctatagacatacctgcggggcaacgtgtcgcggtggtaggcgaatgcggagcaggaaaaagctcattactgggaatgctatctggctacctttcgccaacagacggtgccattttatatgatggatataacttaggacatttatcgcagaactttttttctcagcatttaagcgtggtgacgacacatgatgttttattcaccggaaccattgaaagtaatttcgcgttaaaaccgcaaaacgacaggggccgggtactcaaggcgcttcagctggcgaactgtggttttatcttgcaacatcctatggggctgaagtttccggtgaattttatggctaaaaacctgtcatccggacagcagcagcagttattattagcacgtagtctgagtagtgacgccagcgtctttttatgggatgaaccaacatcaaatctggatgagaataccgagaagcaaatttttgataacttagatgagtttattcatgggaaaacgttgatcatggtgacgcatcgtcgatatctgataaagtattttgaccgggtcctggtaatgaaaggtggaaaaataatccgtgattgttctccggataaattattaatgtaaaataagcagcgcttgtcgctgttatcaggtggtactgcttaataaaaaagacccgttgcacaaacgggtcttttttgtcatttaacgagtcggcaacgtcttcaataagtttagctcgattctgttagggctattccacttgccatttttggataaccacacctggcggccctcatcaacggcaatgcgagggacgtgatggtgcgcaaggctacccctggcgcgcgattccgcgttgagataaccggtgggcggcttcagcggcagcgatagcgtatcaggtcagcaccatcggccattctggcggggtctggctcatcgtttcgaccattacggcttcaatgttatgccagatcgcagcgagatccatcatggtaataccgagtaaaccggtggcaaaccagcaggcggataccacgcccagaccgctactgatcaccgccagaccaatataatctgatttacggaaacggatattgagcgtgctggctaaaaacatgagcacggcgctcagcagttgccagcggagaagaacgacaccagtggttatggcagccatgaaacatttcctctgaatagacctttgtccaggacagcacggcgttgttcccgggaaacgtgggacattctggctatcaacggacatcacatcaacatcgaatgaaacattgtttctatttcattgtttttgtgaactatatcacaaaaaacagcttgttcgccagatcggcaatgtattttttgtgcgttttataaccgtattttttgtgtgacttctacgcgtccgtagagaaactgccggaaagcaaagatgtattattactactcttttattttttttcgtgaaattcagacctgataaaaatatcaagttatttatcaaaagaaaggagtaaagatgtataccccatcgtttacttgagtataaatctgatattatcaaaaatatttagtgtcctgcctggtatgcgaaagagattgcgcgtagttattaatggtaaatgttgatcggtaaaagtctgttgctaatattgataaattcatgcaccgtaagcctccatttggttcacgtcttattttgccaacaatagtcacaaataatgcagggaaataggctgaaaatgagtcaaagcacacgacgcaaggtgttgagatttctcggaacgatcattgtggtgttacttcctatattgctggcgatctggtttgctcatatccgggcagtctctgaaaccagaaatcagttacattcatttgcgcagttggtattagataaaacggagcgggttatcctgcaagcagatttagcccgcgatgccgctgaacaatatcaggggcaagcctgtacgccagcccatcaacagcgaatgctgaatattatccgcggtcgtttgtacattaatgagttgatttatgctaagggccagcgttttctatgctctacggttatgacgccaacaagtccttattttattccccgcgctgactataaacgaaagcctgacatcgctatttattactatcgtgatacgccttttttcaacggttataaaatgacatatatgcagcggggaaactatgtcgcggttatcaatcccttatcttatagcgaggtgatgtcagacgatccggcgttggcctggggaatgtatgatacggtgaccaacacctttttctccctgagtgaacaggcgcaggctgatcagctattacctttggtacgacggagtgaacctgtgttccaacagggtgagcgtttttatactctggttaaatcagcaaaacgaccggttgccacgattgtttcaacctcaaagcaacgcttttaccagaacctctttcatcagcttacgttaacgctaccgttagggatcatctgtagcattatcgtcttatttatgtggtcacgatcccggcaggcatattactcaccgcgtcgattgctgcaacgggccattaccaggcaccagctttgccttcattatcagccgatcattgatatccgaaacgggacatgtgtaggtgccgaagcgctattgcgttggccgggctatcacggtccggtgatgagcccgtgcgaatttattccgctggcggaaaaagaggggatgattgagcagatcaccgattatgtcgtcgaagaggtatttaatgatttaggtggttttctggccgcgcacccgcatctttatgtctctatcaatctctctgccgctgattttctctcttcccggctaattgtgatgattcatgaaaaaacgcgtcagcattcagtgcttgcgcaacagataaaagttgaagtgaccgagcgcggatttattgatgtgcctaaaatgacgccgattattcaggcgtttcgccaggcgggatacgaggtggcaattgatgactttggtaccggctattcgaacttgcataacctgtactcattaaatgtcgaccttttaaaaattgataaatcttttgtcgacacgctaaccactaatagcgccagccatttgattgtggaacatattattgaaatggcgcaaagtttgcggctaaaaatcattgctgagggggttgaaacggctgaacaggttagctggttgctaaaacgcggcgttcagtattgtcagggatggcactttgcgaaggcgttgccaccgcaggaattcatcgcctggttacaacaaacgcccgcgcctctgacgatacgcgggcagaggccctacaggcggtgacggtaatcgctgggagtgcgatcgaactcgcggcggaatacacgcgagaaggtttgctgcgatacatagcccaggtccatcgcgatatcaaaaatcgggcgctcggtcgttcgtagctcaacggccgccaacaggagacggcgctggcgaatatactcgcctaatgtttgatgcgttaccgtacgaaacatccgctgcaaataccacttggagtagcccgatttttttgccaccacatcaatgtttagcggttggtcgatatgttcatcaatccattcgataagggtctgaattatctgctgatgcgacatattgttgcctcttaaacagtattcgattcgtcgttttgtctgcgggcgagtataattcctcaagttaacttgaggtaaagcgatttatggaaaaaaaatctccccgtttaaaagccttactgacgccgggggaagttgcgaaacgtagcggtgttgctgtgtccgccctgcacttctatgaaagcaaagggctaattaccagtatccgtaatagcggtaaccaacggcgatacaagcgtgacgtgttgcgttatgtcgcgattatcaagatcgcccagcgtatcggcatcccgctggcaactatcggcgacgcgtttggtatcttgccggaaggacatacgttaagcgcgaaagagtggaagcagctctcctcgcagtggcgcgaagagttagaccgacgtattcatacgctggtggcgttgcgcgatgagctggacggttgtatcggctgcggctgtttatcgcgtagcgactgtccgctgcgaaatccaggcgacaggcttggcgaacacgggacgggcgcccggctgcttgaagatgattaacatgcactcggccatcgggctgagttcacctaaaactaaagcgccgctaagggcgctttagtttgtttccggtctttgtctttcgctctatcccgctgattacaggagggtttcccccgacgtcaacacccctcatatcgagcacatggtggaggttccggtttgtgttgatactgtaagtgtaagcgacgacgccctgttcgccagcgaaatgctgattttttagccgaaatttttacggcaactgccataattttctatagttagttggcataccttacaggagacagccatgctgacggtgcaccatttaaatcagtctcgttcgcagcgcatcctctgggcgctggaagagctggcgttgccttaccagattgtgcgttaccagcgtgaaaagaccatgctggcgccgccggcattgaaaaaagtgcatccgctgggcaagtctccggttatcgaagatcacggtatggttattgcggaatcgggcgccatcctggaatatttgcaggacacttacgacaatatcggacgctttaagcctgcggatgcgcagggaaaacaacactatcgattctggctacattacgctgaaggttcgctcatgcccttgctattgatgagactgctctttacctctctgggtaaaccgccggtcccattgggcctgcgaacgttgggcggcgttatcggtaagggcgcgcaaaaagcgtacctcaatccgcaactggaaacccatgcgcgctttattgacgggcatctggcaaatcacccctggtttgccggagagcagttaagtatggcggatatccagatgagcttcccgctatttgcgctgcttgcccgaggcggaatcgctcatctcgaccatatcaacgcatggaaagcgcgggtagaaatgcgtccagcctggcagcgagcgattcagcagggcggtccgtttaccatttccggcggataatggcgtttttgtgagcagattgcgcaacgtatttgctaacagcgatgcgaaaaattgttgctggattgcgcagggacgataacgtttgcgcatcgtctggctatttattgagcatactaagcagaaaagcataaaaagcggcaaagttcagttgaaaaagcgttgatgatcgctggataatcgtttgcttttttttgccacccgttttgtatacgtggagctaaacgtttgctttttttgcggcgccccggctgtcgtaaatgtagcacaaggagataacgttgcgctgttagtggattacctcccacgtataccgacgaataataaattctcaggggatgttttctatgtctacgccttcagcgcgtaccggcggttcactcgacgcctggtttaaaatttcacaacgcgggagcaccgttcgccaggaagtcgttgctggcttaaccacgtttctcgcgatggtttactccgtcatcgtggtgccagggatgctgggtaaagccgggttcccgcctgccgccgtctttgtagcgacctgcctggtcgcaggcgtcggctctattgttatggggctatgggcgaatctgccgctggctatcggttgtgctatatcgttgacagcgtttaccgcgtttagcctggtcctggggcagcatattagcgtcccggtcgcgcttggcgccgtattcctgatgggcgtactgtttaccgttatctccgccaccggcattcgtagctggattttgcgtaacttgccgcagggcgtggcccacggaaccggtatcggtattggcctgtttttgttgctgattgccgccaacggcgtcggcctggtcattaaaaacccgctggatggcctgccggtcgcgctgggcgatttcgataccttcccggtgattatgtcgcttgtgggtctggctgttattctcggtctggaaaagctgaaagtccccggcggcattctgttgaccattattggcatttctattgtgggtttgctcttcgatcctaacgtccatttttccggcattttcgccatgccttcgttgagcgatgaaaacggcaactcgctgatcggcagcctggatattatgggcgcgttaaaccctgtcgttctgccaagcgtgctggcgctggtgatgacggcggtgtttgatgcgaccggcacgattcgtgcggtcgcagggcaggctaatctgctggacaaagacggacaaattatcgatggcggcaaagcgctaaccaccgactcactgagtagcgttttctccggcctggtcggggcggcgccagccgcggtgtatatcgagtctgcggccggtacggcggcgggtggtaaaacgggcctgacggcgattaccgtgggcgtgctgtttttgctgatcctgtttctttcgccgctctcttatctcgttcccgtctacgcaaccgccccggcgctcatgtatgtcggtctgctgatgctgagtaacgtggcgaaaatcgattttgctgatttcgtcgatgcgatggcggggctggtaacggccgtatttattgtactgacctgtaacatcgtcaccgggattatgatcggctttgccacgctggtcgtcgggcgtctggtttccggtgaatggcgtaagctgaatatcggaactgtcgtcattgcggtcgcgctggtcgctttttatgccggcggctgggctatctagttctgccttcattctgaaaaacgggcggcgttggtcgcccgttttcattttcaggacacatcacgttaccttttgcgttaatctgaagaaggtgaaaccgaggcatgatgcctctctccatcataaaaaacatcgcaaacagggaacgcatggaaattttcttcacaatactcatcatgacccttgtggtctcgctgtcgggggtatttacgcgtgtattacccttccagcttcctttaccccttatgcagatcgccattggcgcgctgttggcgtggccgacgtttggtttgcatgtggaattcgacccggaactcttcctggtgctgtttattccgccgctgctgtttgcggatggctggaagacgccgacccgtgaatttcttgagcatggacgagagattttcgggctggcgctggcgctggtcctggtaacggtcgtgggaatcggcttcctgatttattggctggtgcccggcattccgctgatccccgcctttgcgctggccgccgtgctgtcaccgaccgatgcggtagcgctctccggaattgtgggcgaggggcgtatcccgaaaaaaatcatgggcattctgcagggagaggcgttaatgaacgacgcctccggtctggtatcgctgaaattcgccgtcgcggtggcgatggggacgatggtctttaccgtcggcggcgcgacgctggaattttttaaggtcgctatcggcggtattctggcgggttttgtggtcagttggctgtatggccgctcgctgcgttttttgagccgctggggcggcgatgaacccgcgacgcaaatcgtcctgctgtttctgctgcccttcgcgtcttacctgattgccgaacatattggcgtctcaggcatcctggccgcggttgccgccgggatgaccatcacccgttctggcgtaatgcgccgcgcgccgctggcaatgcgtttgcgcgcgaacagtacctgggcgatgctggaatttgtctttaacggtatggtctttctgctgttgggactgcaactgccggggattctggaatcttcgctggcggcggcggaagctgacccgaatgtcgaaacctggatgctctttaccgatatcgtgctgatttatgcggcattgatgctggttcgcttcggctggctgtggaccatgaaaaagttcagcctgcgctttttgaagaagaaaccgatggagttcgccagctggacgtcgcgtgaaattctgattgcttccttcgctggcgttcgtggggcgatcaccctggctggtgtgctctctataccgttacttttgccggatggcagcggatttccggcgcgttatgaactggtattcctggcggctggcgtcattctgttctcgttgtttgtcggtgtgatcatgctgccgctgctgttgcaacatctggaagtcgccgatcatgcgcaacagttgaaagaggagcgtatcgcccgtgcggcgacggcggaagtggcgattgttgccattcagaaaatggaagagcgtttggcggcggataccgaagaaaacatcgataatcagttgcttactgaagtaagctcacgtgtcattggtaacttgcgtcgccgtgccgatgggcgaaacgatgtcgaaagctccatacaggaagaaaacctggagcgacgtttccgtctggcggcgctgcgttccgaacgcgccgagttgtatcatctgcgcgccacgcgagaaatcagcaatgaaacattgcaaaagctgctgcacgacctggatttgatggaagcgctactgatagaaaatcagtagtccttgtggcccggtggcgccatgcttaccgggcctacaagtaggccggataaggtgcttgcgccgccatccggcaagggtcttaacccatggcttacggttgtttcagccaaaacccttcgcaacaggttaaccatgcccgggcgctgtgcgacagatacacgccctcgcgccaaatcatgcccaactgccagcggagatcgctttccagcggtagccagcgcagcgtggccttatccagacgctgacaaatcggctccggcaaaatggcgatgccgacgcccgcttgcaccatggcggcgagaaaatcccattgcccgctgcgcacggcaatccgtggttttacgtcatgctggctaaataaggtcatcaactggcggctcagggcaaagtcttcgttatagataagaagaggatgctccgccagagcttcaggcgcgatggagtcgcaggttgtccactgaccggaacggggaaccagcacgcacagcggatgactgaacagcgataacgtcgtcagcccgctcgcttcttccaccgggagcgcggtcatcgcaacatccagctcgccattcattaccgcctgctgtaccgtcaggccgccaaactccgaaattttgagttcaacgccagggtagcgttgtcgaaacaaactgattggcccggccatcaacatgccgaccatcgggggaatacccagccgcagcacgcccttattgagatggttaatatcgctcaactcggcctctaactggcgaaactcagcgaggatcgccagaccgcgttcaaacaccacgcgtccggtatcggtcagcaataacttacgtccgtcgcggatcagtagcgtacagttaagctcatcttcaagatttttcagcatcttgctaatggtgggctgggtgacaaataacttctccgctgcgcgggtgaaactttgctggcgcaccacctcgacaaaataacgcagcgttctgatatccatgattattccttccgactatgcctgcaatgattttaattcatttctgcccgtgacggaggttctctatactggcgctccgtattatttttcaggacattccctcatggctgtggcgataagccgcgttacgcctgccgttgtgcaacgactccaggtaccggttcaggtactgctctatgcaggtttattcattttttcccaatatcttgtctcctggctgcacctgccgttgcccgcgaatctggtcggcatggtgcttatgttggcgctgatcgtttgccggattattccgcttagctgggtacgcgcaggcgcacgctggctgctggcggagatgctgttattctttgttcccgccgtcgtggcggtagtgaactatgcccatctgttactggtggacggctggcgcatcttctcggtgatagcgatcagtaccttaatggtactcggcgcgacggcgtgggtggtggataaagtgtatcgctatgagatgagtaggctaaaccgtgaataacgttcagttaagcgtactgtgtctggtgattacgctggggatttacttcgccaataagcgtctgtatcgccgttttcgcaaactgccgttgatgccattagtgttgacgccggcactgctggtgttaatgctggtgttcggtcatatctcctggcaaaactatattggtgaatcgcactggctattgtggctgctcggcccggcgactattgcctttgcggtgccggtgtacgataacctcgcgattatcaaacgtcactggatgtcgctcaccgcgggcgtagtgacggcgacggtggtggcagtcaccagttccgtttggctggcgcgtctgttcacgttatcggatgagattcagcgtagtctggcggtacgttccgttactacgccgtttgcgctggcggcggcagaacccctgggcgggcagccagatctggtggcgctgttcgtggtcgtcactggcgtgtttggcatggcggtcggcgacgcgctatttttgcgtctctctatccgggaaggcatggcaaaaggggcaggattcggcgcggcgtcacatggggcgggcacggcgcgttcctatgaacttggtcagcaggagggcgtcgtcgccagtctggtaatgatgctgtccggcgtggtgatggtgctggcagccccgctggtggcgagggtgatgttctgattttcctccgacccacggggccggaggaaacggtaagattaatgcgcacgcccttgttctacgccgaatcccgtttgggagcggataaactgagcgcggaactgctcacgttcacggttgccttctgccgagttatcggtggccgagaaaaaccagatccccaggaacgccacactgatagagaacagcgccggatactcatacgggaagatcgctttttcgtggccgaggatctgcacccaaatggtagggccaagaatcatcagcaccaccgctgtcagtaaacctaaccagccgcccagcatagcgccgcgcgtggtcagttttgaccagtacatggaaagcagaatgatggggaagttgcagctcgcggcgatagcaaacgccaggcccaccataaaggcgatgttctgattttcaaacaggacgccgaggataatggcgatcacgcccagcaccaggacggtgattttcgacaccttcagctcttcacgttcggttgcgcctttgcggaacacgttggcgtacaagtcatgcgacaccgccgatgcgcccgccagcgtcagaccggcgaccaccgccagaatggtggcaaacgccactgccgaaataaagccgaggaacaggttgccgcctaccgcgttggccagatgcaccgccgccatgttattgccgccaatcagcgcgcccgccgcatctttataggcgggattcgcccccaccagcatgatagcgccgaagccgataataaaggtcagaatgtagaaatagcccataaaaccggtggcatagaacacgctcttgcgcgcttcgcgggcatcgctgaccgtaaagaaacgcatcagaatatgcggcaagccggcggtgccgaacatcagtcccagacccaacgacaatgccgaaatcggatcttgcaccaatcctcctgggctcataatcgccgtgcctttcgggtgtaccgccatggcttcggtaaacagattattgaagctaaagccgacgtgtttcatcaccataaaggccataaaactggcgccaaacagcaacaggacggctttgataatttgcacccacgttgtcgccagcatcccgccgaacagcacgtacatcatcatcagcacgccgaccagcaccacggcgatgtgatagttgaggccgaacagcagttcaatcagtttaccggcgccgaccatttgggcgatgagataaagcgccaccactaccagggagccacaggccgaaagaatacggattggcccctgtttcaggcgataagaggcaacgtcagcaaaagtataacgtcccagattacgcaggcgctcggcaatcaaaaacaggatgattggccagccgacaagaaagcccagcgaatagatcagcccgtcataaccggaggtaaacaccagcgcggaaatgccgagaaatgacgcggcggacatatagtcgccggcaatcgccagcccgttctggaacccggtgatattgccgccagccgtgtagtagtcgctacgggaacgtacgcgtttagaggcccagtaggtaataccgagcgtaaacacgacgaaaatcaaaaacatgataatcgcctgccagttggtgggctggcgttcaaccgcgccgctaatggcatccgccgcatgagcggcgaaggggagtgcggcggcaagcgccgtcagaactctcttcataatgctttcacctcatgcagtacggcgttattaagacgatcgaattcgccgttcgcccgccagatataaattccggtcaacacaaaagaaatcacaatcaccccgacgccaatgggaattcctcgggtgacgctggttcccgcatgtagaggcgtgcccagccagccaggcgcgaaggcgatcagtaaaataaagctgatataaaccgtcagcatgataaccgacagaatcgtggcaaaccgttgccgtttttcaactaattccctgaaacgcgcactgtcttctatccgctgataaatttggtcattcatcacagagctctccagaggtccccctgcgtctttcgcgctacaggcgcgttggccgcactcgcgcgccccagccacatagtgaacttgaactatgctgctgagggtgtgctcgcttgccgccttcctgtaacacgaaatcctttgggggagggttttttatatttccctctcccggtttgagagagggcaggggtagggtcgtaggccggataaaacgcgttcgcgttgccatccggcatttatggttatgacggcatcgcgatggcctgcttctcttcgagcagtttctccaccacgccaggatcggcgagagtcgaggtatcgcccagattgctggtatcgcccgccgcgattttgcgcaaaatgcggcgcataattttgccggaacgggtttttggcagtgagtcggtccagtgcagcacgtccggcgtcgccagtgggccaatctctttacgtacccagttgcgcacctccgcgtacagttctggcgacggctcctcgccgtggttgagcgtcacataagcgtaaatcgcctggcctttgatagcgtgtggaatacccaccaccgccgcttcggcgatcttcggatgcgccaccagcgctgactcgatttccgccgtacccagacggtggccggagacgtttaacacgtcatccacgcgaccggtgatccagtaatagccgtcctcatcgcgacgcgcgccgtcgccgctgaaatacatattcttaaaggtagagaaataggtctgctcaaaacgttcatgatcgccgaacagagtgcgcgcctggcccggccaggaatcggtgatgaccagattgccttccgtcgcgccttcttgcggatggccttcgttatccaccagcgcaggctgtacgccaaagaaaggacgggtggcggaaccggctttcagttcgatagcgcctggtagcggcgtgatcataaaaccgcctgtttcagtctgccaccaggtgtcgacgaccggacatttttccttgccgatcttcttccagtaccattcccacgcttcgggattgatcggctcgccgacggaacccagaatgcgcagtgaagaacggtcggtgccttcaatggctttatcgccttccgccatcagcgcgcggatagccgtcggggcggtataaagaatgttgacctggtgtttgtcgaccacctggcacatgcgagcgggcgttggccaattcggcacgccttcaaacattaaggtggtcgcgccgcaggccagcgggccatacaacagatagctgtgccccgtcacccaacccacatcggcggtacaccagtaaatatcgccagggtgataatcaaagacatacttaaaggtggtcgcggcgtagaccagatagccgccggtggtgtgcagcacgcctttcggcttgccggtggagccggaggtataaaggataaacagcggatcttcggcattcatcgcttcaggctggtgctcagggctggctttttcaatcaaatcgcgccaccacaggtcgcggccttcttgccagtcaatgtcgctgtcggtgctcttcaggacgatcacatgctcaacgctagtgacattcgggtttttcagcgcgtcatcgacattctttttcagcgggatactgcgtccggcacgtacaccttcgtcagcggtgatcaccagccgcgagctggagtcgataatgcgtccggcgacggcttccggcgagaagcccccgaagatcaccgaatgcaccgcaccgatgcgggcgcaggccaacattgccaccgccgcttccggcaccatcggcatataaatcgctaccacatcgccttttttaatgcccagatccagcagcgtattcgcgaaacggcagacatcgcgatgcagttcgcgataagagatatgtttactctgcgacgcgtcatcgccttcccagataatggcggtgcgatcgccattttcctgcaaatggcggtcaagacagttcgccgccagattcagcgtgccgtcctcgtaccatttaatcgacacattgcctggcgcaaaggaggtgtttttcactttttggtacggcgtgatccaatcgagaatttttccctgttcgccccaaaacgtatcggggtcgttaatagactgtttatatttagtctcatactgctctggatttatcaggcaacgatccgcaatgttggcgggaatggcgtgtttatgtgtttggctcatgctgttgttctccttgtaggatgttaataatatgtcgcataaacgttaaatgtagggtcttaataagttttgtttagtatttgggcgacagatcacgcaaaaagggaactgtgcaaataagcagcaatctattttttgattgtgtcccgcaaaattagataaattttcgggataacatgacgttatatgaaattttttaaaaaagtgatccgtgtccggaaatcagaaaagagagggagttttgtccaggttactaactctaaagtggtattttacatacacttacaattgattaaagacaacattttaagtgtggttatttgttacacatagaggagatcaatgtaataacagtatttgtgcggttgctgttatggaaaacgataaaaaatcgccattaaagataatggcgcaatctggatgagacctctatggcaaggaaaacactacgcgcacgccgtttcttcagccttatatttccttttttcttcattacctctgtttacgctgagcaaacgcctgaatccgcaaaaaccgttactgttgaagcgaaaaatgaaatgttcgcgcctcaacaccccgaccaatatcagtcatggaaagcgacgtcagaacagtctgcccgtgaagatgcgctggcggaagaccctcgtctggtgatcctgtgggcgggctatcccttctcccgtgattacaacaaaccacgcggccacgcgtatgcggtaactgacgtgcgcgaaacactgcgtaccggcgcgccaaaaacggcggaagacggcccgctgccgatggcctgctggagttgtaaaagccccgatgtcgcgcgccttatccaacaagaaggcgaagacggctacttccatggcaaatgggcgcgcggcggcccggaaattgtcaacgatttgggctgtgccgactgtcataacaccgcgtcggacgatttcgcccaggggaagccagcgttaacgttgtcgcgcccctatgccgaacgggcgatggaggctatcggcaaaccgtttgataaagcgggacgatttgatcagcaatcgatggtctgcggtcagtgccacgtggagtactactttgacggtaaaaacaaagccgttaagttcccgtgggatgaaggcatgaaggtcgaaaatatggagcaatactacgacgccatcgccttctctgactggactaactcgctgtcgaaaaccccaatgctcaaagcgcagcacccggaatatgaaacctggagcgcgggcattcacggtaagaacaacgtgacctgtatcgactgccacatgccgaaagtacagaacgccgaaggcaagctctacaccgaccataaaatcggcaacccgttcgacaatttcgcgcaaacctgcgccaactgccacacccaggacaaagcgtccctgcaaaaagtggtcgccgagcgtaaacaggcgattcatgacctgaaaatcaaggttgaagatcagctggtacatgcgcacttcgaagcgaaagccgcatgggatgcgggggcgacagacgcggaaatgaaaccgattctgaacgatattcgccacgcgcagtggcgttgggatctggcgattgcgtcacacggtattcatatgcatgccccggaagaaggtctacggatgttaggcagtgcgatggataaagccgcggatgcccgtactaaactggcgcgactgctggcgaccaaaggcattacccatgaaattccgctgccggatatttcgacgaaagagaaggcgcagaaagcgattggtttgaatatgcaacaaatcaacgcggagaagcaggacttcctgaaaacggtcgtaccgcagtgggaagatcaggcgcgtaaaaacggtctgttaagccaataacctcacatgtgacaaatttgccggatgacagcgcaagcgctttatccggcctacagaagtcttgtaggccttaaagctgcgcgccatcaggcattatgtaatggagtgaatatgagcgtattacgttcgttattaactgctggggtgctggcgtcaggcctgttctggagcctgagtggaattactgccacgccaacgccgcaggagtcggatcaacgctggacggtcacccagcagcgtaatccggatgctgcctgtctggactgtcacaagccggacaccgaaggtatgcacggtaaacatacgggcgctatcaacccgaacaataaattgccgataacctgtaccaactgccacggtcaaccgtcgcttcaccaccgtgaaggggtgaaagatgtgatgcgttttaacgacccgatgtatacggtagagcagcagaacagcgtctgtatgtcctgccacttgcctgaacaactgcaaaaagcgttctggccgcacgatgttcatgttactaaagtgacctgcgccagttgccattccctgcatccgcagcaagacacgatgcagacgctaagcgagaaagggcggatcaaaatatgcgtggattgccacagcgatcagcgtactaacccgcactttaatccggcgtccgttccgttgcttaaggagcagccatgagttgcacccgacgtcaatttattacccgcgtcggctcgctggcggcggtcagtgggatggcaggacgcgttgtagcgaacacgttgaatattaatggcgtgcgttatggcatggtacacgatgagtcattatgcatcggctgcacggcctgcatggatgcctgtcgggaagtcaacaacgtgccggaaggcgtatcgcgcctgacgattattcgcagcgagccgcaggggacgtttcctgatgtgaaatatcgcttcttccgccactcgtgccagcattgcgaccatgccccctgcgttgacgtctgcccgacgggggcatcattccgcgatgccgccagtggtattgtcgacgtgaacccggacctttgcgtcggctgtcagtactgcattgccgcgtgtccctaccgcgtgcgctttatccatccggtcagtaagacggcggataagtgcgatttctgccggaaaatcaacctgaaagcgggcaaacagcccgcctgcgttgagtcatgtccaacgaaggcgctgacgtttggtaatctggacgatcccaacagcgatatctcccgtttgttgcggcaaaaaaccacctatcgttacaagctggcgctgggcacaaaaccgaaggtctaccgcgttccctttaactatggggaggtgagccaatgacatccgcttctccatttcattttgcatcactggtgtgggactggcccatcgccatctatctgtttctgattggcatctccgccggactggtcacgttggcgattctgctgcgtcgcttccatccggaggcgggcggttcggacagcacgctgctgcgcactacgctggtgttagggccgggggcgattatcttcggtctgctgattctggtcttccacctgacgcgcccgtggaccttctggaagctgatgttccactacagctttacctcggtgatgtcgatgggggtgatgctgttccagttgtacatggtagtgctggtgctgtggctggcgaaaatctttgaaaaagaggtgattgccctgcaacagcgttggctgccgcggttagggatcgtgcaaaaagtgttggcgctaataacgccgtttcatcgcgcgctggagacgttaatgctggtactggcggttctgctcggagcgtacaccggctttctgctgtcggcgctgaaatcctatccgttcctgaataacccgatcctgccggcgctgtttctgttctccggcatctcctccggcgcggcggtggcgctgatcgctatggcgttacgccatcgtagcaacccgcacagcaccgaggcgcgctttgtacatcgcattgaaaccccagtggtatggctggagatcttcctgctggcggccttttttatcgggctggcgctgggcgatgacggcaaaatgcgcgcgctggcggcggcgctgggcggcggattctggagctggtggttctggcttggcgtcgtagggctgggattgattatcccgctgctgctgaagccctgggcaaaccgtagcgtcacgtttcacggcgtgctggccgtttgcggcgccagtttgaccggcgtgctgctgctgcgctttttcattctttatgcgggacagctaacggttgcataatctggacatcttccttcctgaagccggatttctggcgctgttgttgagtctcggggtcaacgtgctgaccccgctggcgacgtggtgcgggatggggctgcactggcgcggcgtcatgcgcctgacgacctgcggcgcgtggacggcgttcacgctgctgctactggcgtttgcgattctggttagctgttttctgaccagcgatttttcggtcgtttatgttgcgcagcatagccatagtcagttgtcatggggactgaaactggcggcggtatggggcggtcatgaaggctcgctcctgctgtgggcgctgcttctttcggggtggacggcgctattcgcctggcgctcccggcatgaatctgacgcgctttttccgctgaccctgagcatcttgtccctcattatggcttcgctgctgctatttattgtgctgtggtccgatccgttcctgcgtattttccctcccgccatggaagggcgcgaccttaatcccatgctgcaacatctggggctgatcttacatccgccgctgctctatctgggttatggcggcctgatgaccgcggcgagcgtagcgctggcttcgctactgtgcggcggctttaacgccgcaaccgcctgggtttgctggcgctgggcgttacccggctggtgcgctctgacgctggggatcattctcggatcgtggtgggcgtattgcgaactgggctggggcggctggtggttctgggacccggtggaaaatgcctcgttgttgccgtggcttgccgccagcgcgttgctgcacagtctgtatgtcagccgccagcgcgggagcttccgtcactggtcgttgctgctggcgatactgacgctgatcctctcgttgctgggaacgctgattgtgcgttccggcattcttgtttcggtacatgcctttgcgctggataacgtgcgcgcggtgccgctgtttaccctttttgccgcgttaagtctggcatcgcttgttctgtacggctggcgggcgcgggagccgtatccggcgacgcgtttgggcggcggaaagtgcgaaacgctcattctggcgacgctgctgctctttagcgccgtcttgttgatcgtgctggtcgggacgctctaccccatgatttatggtttgatgggctggggaaggctttcggtgggcgcgccctattttaatcgcgtcacgctgccgtttggcctgctgatgctggtagttatcgtgctggcgacaatcagaagccgcaaagtctctgtgcgttgtcagcttccggcattgctggcgcatacgggcgtatttatcttcgccgccgggatcatggtttccagcggcagtcggcatgaaatcagccttaacctcagccccggtcagcaggtggtactggcgggctatacctttcgtttcgagcgtctggatctggaggccaaaggcaactacaccagtgaaaaagcgcggatcacgttgtggcggaatgaaaaacgcattggcagcctgcagcctgaaaggcgcttctatgccgcgcgtcgtcaacagatgatggagccggggattcactggaacctgctacatgactggtacgcggtgatgggcgaaaaaaacggaccggatcgttacgccatgcgcttatacgtgcagaccggcgtgcgctggatctggggtgggggattgttgatggtgtgtggagcgctgctgagcggatggcgggggaggaagcgtgatgcgtaaattactcacagcgttgccggatggcggcgtaaacgccttatccggcctacaggatgcgcaaaccgtaggccggataagcgtagcgccatccggcagaaagtttttactcttaacgatcgtcctgtttttaatcaccttcgccacccacgcccaggtggtggatacctggcgctttgacaatccacaacagcaggaaaaagcgctatctattgccagtcaactgcgctgtccgcagtgtcagaaccagaatttgctggaatccaatgcgcccgtggcggtcagtatgcgccatcaggtttacagcatggtggccgaaggtaaaagcgaagcggaaatcaccgcctggatgaccgaccgttatggtgatttcgtacgctacaacccgccgttgaatgagcaaacgctgctgttgtgggcgctgccgtacctgctgttattgctggtgggcgtggtggcctggcgggtgagaaagcgtcagcacgcaggagagggggaacaatgagccagtctgaacactccactgtgccgttacgtcccatgcccgtaaagcgtctggcggctgcggcggtgttgatggtggctgcctgtgtcggcggctatctgttgacgccgaaatggcaggctgtgcgtagcgagcaacagcgtctggccgatccgctacgtgactttacgaacccgcaaacgccagaggcgcagctttccaggctgcaagaaaaaatccgcgccaatccgcaggatagcgagcaatgggcgcggctgggcgagtattatctctatcgcaatgcgtatgacaatgcgctgctggcatatcgtcaggcgttgcgtctgcgaggcgataacgcgcagcttttcgccgcgctggcaacggtgctgtattaccaggccgggcaacatatgacgcctgcgacgcgtgaaatgattaataaagcgttagcgctggatgcgacagaagtgaccgcgcagatgctgctggcggcggatgcgtttatgcaggcggattatgcgcaagccgtgtcgctgtggcaaaccttactggatgccaactcgccgcgagtgaaccgcgcgcagctggtagaggccattaatttgactaaattgttacaaaatcggcagaaataattttttcttttttgtgacttttgtcatgtgtgctgtttaaaaaaacggcgaatgagacacaagtaaaaattaattacctcagtgtattattcgtttttgacgaagtaaaaaactttccataacaaatagttattcatcattaacgccataaactcgcgttattatgcataaaaacagccaaaagccctgttatgaaagggttgcgcaagacgctatgcaaatgatactgattatgcgcgttaaaaaactctacaaaccaacgcaacacaaatcataccctttcagtatgtattgctctcatgctttcggcggagagcaacgcttcatcgaggaagtctgttgttatgaaaaatttgaaagtcagcctggcctggcaaattttgctggctatggtgctgggcattctgttgggcagctatctgcattatcacagtgacagtcgtgaatggctgattgccaacctgctgtcgcctgctggcgatatctttatccatctgattaaaatgatcgtcgtgccgatcgtgatctcgactctgattgtcggcatcgccggcgttggcgatgcgaaacagctaggccgtatcggcgccaaaaccattctctattttgaactgatcaccacggtggcgattatcctcggcattacgctggcgaatgtctttcagccaggctcaggcattgatatgtcgcaactggcgaccgtcgatatttcgaaataccagaacaccacggcggaagtacaaagtcatgcgcatgggctgatggggacgatactgtcgctggtgccgaccaatatcatcgcatcgatggccaaaggggatatgctgccaattatctttttctcggtcctgtttgggctggggttgtcgtccctgccggcaacgcaccgcgaaccgctggtgacggtatttcgttccatctctgaaaccatgtttaaagtcacccatatggtgatgcgctatgcgccagtgggcgtttttgcgctgatcgccgtcacggtagcgaattttggtttcgcgtcgctgtggccgctggcgaaactggtgctgctggtacactttgccattatcttctttgcgctggtggtgctgggtatcgtggcgcgcctgtgcgggttaagtatctggattctgattcgcattctgaaagatgaattgattctggcgtactcgaccgccagctccgagagcgtgctgccgcgcattatcgagaagatggaagcttacggcgcaccagcctctatcaccagtttcgtggtaccgaccggttactcatttaacctcgacggctccacgttataccagagcatcgccgccatttttatcgcgcagctatacggtatcgacctgtcgctgtggcaggaaattgtactggtgctgacgctgatggtgacgtcgaaagggattgccggcgtgcctggcgtttccttcgtggtgttactggcgacgctgggcagcgtgggcattccgctggaagggctggcgtttatcgccggtgtcgaccgtatcctcgacatggcgcgtactgcgctaaatgtggtggggaatgcgctggcggtgctggtgatcgccaagtgggaacacaagtttgaccgcaaaaaagcgctggcctacgagcgcgacgtgctgggcaaatttgataagaccgcccaataacggattgccggatggcgctttgcttatccggcctacagcgaaagagaatgtaggccggataaggcgttcacgctgccatccgacaacctgctccgggttgcctgatggcgctacgcttatcaggcctacaacgactacgttcatccggcaataaacatcagccatttgttagcgtttcgaactcttcgcaaccggtatcaaacccttccagacagcttagattcaaccagtgcaacgccttctgcttgttcttttcaataaagcccggttctccgtttaaaaacatcattcccgcccagtattctgaatagccggtacgggaaatggcggaactgcgtttgaaataccaggcggctttttcatcatcggcggcaatgcccacgccgttggcgtaaatcaggccaagcaacatttgcgcatccaccgcggagtcgttatccagatcttcagaggccttttgcagcagcgagatggcttttgggtagtccggacgcccggcctgggtgttgatcaggatccgcgccagcgtaatttcgcccgctttactgcccgcgttagccgccttttcagccagctttttcgcgtcgggataatccaggcttaccggattagtgattttgatttgcgccagtagcgcgcaggcgtcggcgtcgccactgtcggcggctttttgcgcccagtattcagctttgttcaaatcgccatagctcaaccaactgtcggccagaaaatattgtgcgcgtctgtcacctgcctctgctgcctgcaaatactggctacccggctcaggatctgcggcatgggcaaagaatgtcataaacaacatcaatgcaagaagtagtttcattttgaattttatttagggtacggaaaagacagtataaagagatcgtatggataaaaaaacagcctccgggcggaggctgttatagggaaaatgcctgatggcgatgctaatgcatctaatcaggcctacagtagacgcaggccgaataaagcattctgatgccgccatccggcagatcaacccattgcgctttcgcgcaggcgggttttcagcttgttgtactcatcaatcacatactgctcggcggctcgctgatcggcgatcggctcaacgcgtacggcgcagtatttgtactccggcgttttggtaatcgggctgaggttttcagtcaccagctcgttacaggcgccaatccaccactggtaggtcatgtaaatcgcccctttgtttgggcgatcgctgacctgcgcgcgggtgatgattttgcctttgcgcgaatgaacccacaccagcgcttcatcttcaatgcccagacgcgcggcgtcggcggtattgatttgcgcatagcccggttcatcggccagcgcggccagcgccgcacagttaccggtcattgagcggcaggagtagtggccgacttcgcgcaccgtcgacagtaccatcgggtactcttcggtgagtttatcgataggcgctacccagtcgcaggtgaagaactgcgccagaccgttgggggtatcgaacttctctttaaagaggtacgaggttccctgatcggcatccgacgtgtcgcggcatggccactggatatagcccagttcgcccatcttctcgtaagtggcgccgtagaaatccgggcacagatgacgcaactcatcccagatttcctgggtattgttgtagtgcatcggatagcccatccgggtggcgatttcactgataatctgccagtcggttttcaggtcccacttcggttcaacggctttaaagaagcgctggaagccacggtcagccgcagagaagacgccttcatgctcgccccaggaggtggagggtaaaatcacatccgccgccgacgcggttttggtcatgaagatatcctgcacgatgaccagttccagatcctcaaacgctttacgtactgcagagagttccgcatcggtttgcagcggatcttcacccataatgtacgccgcgcgcacttcgccatgcgccgcacggtgcggcagctcgctgatgcgatagccggtatgcgcaggcagactttctacgccccaggctttagcgaacttctcgcggttttccgggaacttaacgtactggtagcccggataagtatccgggagcgcgcccatatcgcacgcgccctgaacgttgttctggccgcgaaccgggttaacgcccgcgcttggcttgccgaggttgccggtcagcatcgcgaggctggtcagtgaacgcacggtttccacaccctgatagaactgcgtgacgcccataccccacaagatcgctgcgcttttcgcgctggcatacatccgcgccgcctgacgaatttcctgtgcgctcacgccagtgatctcttcgacggactccggcgtatagccttcgacaatcttactgtactcttcaaaaccttcggtacggctggcgacaaacgctttgtcgtacaggttttcttcaataatgacatgccccatggcgttgagcagcgcgatattcgagccgtttttcaacgcgatatgcatgtcagcgatgcgcgcggtttcaattttgcgcggatcgcagacgataattttcgccccgttgcgtttagcgttaattacatgattcgccacgatagggtgggaatccgccgggttatacccgaagacgaacactaaatcagtgttatcaatttcgttaatcgcattactcattgcgccgttaccgaccgattggtgcagacctgcaaccgatgggccgtgtcagacgcgagcgcagcagtcaacgttattggtaccaataacggcgcgtgcgaatttttgcattacatagttggtttcatttccggtaccgcgagaggagccggttgtctggattgcatccggaccgtacttcgctttgatggcgctcaaacgttcagcgacgtaattgagcgcttcatcccaggaaacagattccagtttgccgccacgctggcgacggatcattggggttttcaggcgcggggtcaggatctgggtatcattaataaaatcccagccgtagtagcccttcagacacagggtaccctggttggttttcccctgcgccgcctcagcccggacgattttgccgttatcgaccaccagattgattttgcaacctgatgcgcaatacgggcaaaccgtgacgacttttttcatcggtttcgctccagttaatcaaatcgcgcatacgcgctgtcgccctcagtatgcatgttttatgccacttttttagtatgggctttccctgatattacgggcgaattttgctcaaaaccctgacgaaaaacaggctatcgtcagttttgacgtgtcgaaagaaaataccgcatgacatttattatggggagaaacgcggagcgcaggccagataaggcggagccgctatccggcaatctgctctgcctgaagtggaaattatccggatggatagactcaaggccagggaacgctttgagactaacgccaggatagaacaggccgcggcaggcagttccataccgcggcccggcttcagaggaggctgaaaaggattatcgcggcaaaaatagcagcaataacgagatatttcagcgcgtaatagagagtgcggtttttctttttcagacgttgcccggcatcgcgtgctgcgtgaacgtatttaaagatgcgattaatcgcaccggtgcgatcgttctcgtcgtttggcgaactggcggcggacatcaacgatgcgccgacccagtggtttacgctctgcgcccagcgccatttcattgggcgctcaatatcgcaaaagaggataatacgcgtctgttcagttttattttccgcccaatgaacgtaggtttcgtcgaagatgacggctttgccgtcgcgccagctatggcgctgtcgatcaacttcaataaaacagcggtcgtcattcggtgtgcttaatccaagatggtaacgtactgaaccggcataggggtcgcgatgttttcccagataggccccgggaggcaactcggcgaacatcgccgctttaatagaggggatgctgttgaccagctttgtcgttatcgggcataacgtttccgccgacgggtgggcatcggaataccatttaaggtaaaaccgtttccagccgcgcttgaaaaaggtgttgaatccggcgtcgttattggcctgcgcggcttttatgtgatgctgaagccgtagcgcctcttcacgaatcacctgccagttttccgtcagcttctgcagctctggaaatgccgtggtatcaaagtacggctgctttgccggtaacgttgagaagcgagtcatgaacatattgatcggcgccataaacgtcgagtggtcaaagagttgacgggaaagtttttgtttttccacaccgcgtgaatgcgcataaatgacgctgataataaaaataccgataatgattgctgcgaacataacgtcactgtccttctaagaaaacctcatcccgggattttcaggcaaccctcccggtgatgccaaagagaaaagtgtagttcgttgacaataaatttacatttctacaacttaaaagggccatttttgctaaagaagcgagtcagcccgtttaacctttatccaggcttgccgacagtagaattgagatggctccgctacttcacccggtgacggctgattacgttatgccttatctcctgatgacggctgccagatcacaatgctttggtaaaccggaaatgactttgcttgtaaccttcgcgaagataaaaacggtgtgcatcgcggcgtttaatatttgtggaaagctccgttagctcggcgcccgcctgacgtgcttcttcttctgcccaggccagaagctgactgccaattttttgtccccgcatcggcggtaataccaccagctcctgaatttcgccaatccagttggcatgatggagatgaaactgcatatgcaggctgatcatgccgactacctctccgttacgcagcgctaaacgataatgaaagttggggtccagtaaattagcggcgaacccatccctgaaagcctgataatcaagctcatttttaagtaactcacagataagcgcgtaaacagaatcggtatcctctgttgtcgcgtggcgtaattcacagactggcataatgtcctcccgacgcttcatcaggatcaaccatctttcgacagactgtagcaaactaccgtcattatttattctatggcagttaaacggcggataacgtgcagccaaagatcactctgatggcaagggggagggcgagcctcccggggagttaggtggcaggctgatgtttaaccacgttaatcatccacggcacaccgaaacgatcgctgaccttgccgaaaccctgcgcccagaaggtctcctgccagtccatttcgatttgcccttgtgcggcaaggttatcaaaccagcgcttcccttctgctacatcctgggtatcaagcaccagcgtaaagccggaataatgcgccgttcccgacgggctggcatcactcatcatgatatcgctgccggcaatacgcatgttggcgtgggcgatagcagtatcgggaaagcgcattcctgacgggcagccctcttcgttatccgccgccgaggggggcatttcaccgaagctgagtttataaagcagttctgcgcctaacgtttgttgataatacgcgatggcgtcggcacagttgccggcaaaagagagatagggacttaacggcatgatggttacctcaggtaagagatgctcgttaagtgtagttcgaaattggcacaatattgtcggtggcagggccgctcaggcccggtaagcaaggcgctaccgggcaatgacgcggtaaatcagttctttttcacgaactctgatttcagtttcatcgggccaaaaccatcgattttgcagtcgatgttatggtcgccttcaaccagacgaatgttcttcactttggtgccgattttcagcatggaagagctgccttttactttcagatctttcacgatggtgacgctatcgccttctgccagcaggttgccgttggcgtctttgacaatcagctcatcgctctcctgagcgggttccgcatcgttccattcgtgagcgcattccgggcagatgaacatgccgttatcttcgtaggtatattcggagttacattgcgggcagtggggtaatgacatgttggtatcctcaaaaagtcagcgggggcaaacgcgcccaaaaatggcagatcgccgaaaaaggccgcaattatacacaaaatccttagcgttgtcgggactattgccgcttttataaaagggtctgcgccacgccagtcagcaatggtttacactcgaataaccgcttttttactgtcaccacagcgcattagggcgtccttgtttacaccttttgaccgaattgacatatatgtgtgaagttgatcacatatttaaaccctgttagggtaaaaaggtcattaactgcccattcaggcgtcaacaggttcggttgtacagtccgtaaccggacagtgtaagtaaacctgctacgcttgtatgagggatagcgttcgcgcccctccctccgctcgacggcgacgctggcgcggtatgccagtgcccgccgtatatagcgctacagggcttagcctatgaggacagctatgctgaaaaggaaaaaaataaaaccgattacactgggcgatgtgaccatcattgatgacggtaaacttcgcaaagcgattaccgccgcctcgctgggcaacgcgatggagtggtttgattttggtgtttatggatttgttgcctacgcgttgggtaaagtctttttccccggcgccgatcccagcgttcaaatgattgccgcgctggccacgttttccgttcccttcctgattcgtccgctcggcgggttattctttggtatgctcggcgataaatacgggcgccagaagatcctggcgatcacgattgtgattatgtcgatcagtaccttctgtatcgggttaatcccctcttacgcgacgatcggtatctgggcgccaatactgttgttgctgtgtaaaatggcgcagggcttctcggttggcggggaatataccggcgcgtcgatctttgtcgcggaatattcgccggatcgtaaacgcggatttatgggaagctggctggattttggttccatcgccgggttcgtgctgggcgcgggcgtggtggtcttgatctcgacgattgtcggcgaggagaatttccttgagtggggctggcgtattccgttctttatcgccctgccattggggattattggtctctacttacgccatgcgctggaggagacgccagcgtttcagcagcacgtggataaactggagcagggcgaccgcgaagggttgcaggatgggccgaaagtctcctttaaagagattgccaccaaacactggcgtagcctgttgtcatgtatcggtctggtgattgccaccaacgtgacctactacatgctgctcacctacatgccgagctacctgtcgcataacctgcactattctgaagatcacggcgtgttgattatcatcgccattatgatcgggatgctgtttgtgcagccggtgatggggctgctgagcgaccgtttcggtcgacgtccatttgtgattatgggcagcattgcgctgttcgcgctggcgatcccggccttcatcctgattaacagtaacgttattggcctgatttttgccggtttgttgatgctggcggtgattctgaactgctttaccggggtgatggcctcgacattgccggcgatgtttccgacgcatattcgttacagcgcgctggcggcggcttttaatatctctgtattgattgccggtctgacgccaacgctggcggcctggctggtggaaagctcgcaggatctgatgatgccggcgtattatttgatggtcatcgcggtgataggcttgattaccggtatttccatgaaagagacggccaatcgtccgttaaaaggcgcaacgccagcggcgtcggacatccaggaagcgaaggaaattctgggcgagcattacgataatattgagcagaaaatcgacgacatcgatcaggaaattgcggagctgcaggtcaaacgttcgcgtctggtacagcaacatccgcgtatcgatgaataaatttcgcgcttaaggttcgcttaatctctcgcgggcatactctcctccatacctttggaggagagcgtcatgaaaagctatatttataaaagtttgacgaccctgtgtagtgtgctgattgtcagcagttttatctatgtgtgggtcacgacgtattaaacgcctgttatgcctttttcaacagcacccaggcacgggtgcctgttctttccgtacggttttgcaggaaaaactgtccctgatgtagctgggtgatgcggctgacgatactcagccccaggccaattccgccataacggctgtccatccgcacgaacgcttcgcttagcttcccgcatttgctttcatcaatacccggcccctcgtcttcgaccgccataatagcgtcggggtcggcgctaatgtggatagtgatatgggttccttcagggctatagcgatgcgcgttttccaccagatttcgcagcagcatacgcagtaacgtcgcgtcaccgcgcactaccacgtccgccgcactttccggcagcaacagagtttgctggcgcgtttccagcatggtgttcagctcatcgtaggaggggaggatcacatcttccagcagttttacttcctgataattcccggaagagaatgactggcccacgcgcgccagttgcagaagctgggagacgctatccatcatctggtcaagacgggcgataagcggcgcgacatcaacattgtgggtttttgacaataattccagatgcaaacgcacccccgacagcggcgtgcgtagctcatgggccacatcggcggtaaaaaggcgttcattgtcgagcgtggtggtcaaacgcgtaaccagttgattgatcgccgagacgacggactcaatctcaagcgtggagctgtgaatggcgatcggcgccagattatccgccgtccgcgcttccagctctttttgcagttcggcgagcggacgggtaatacgccgtaccgcctggtaacaaattagcagcgtcaggctaaccataaatacgccggggacgatcaggctggcgaccgcctcgcgaatttcgtgcatgatatggcgatcgttgttgcgattatcccgcagcgcctgctcgaacaattggatttgctcagtgctttcatgccataaccagaaggtactgattaactggaacaccagcagaataagaccaattgtcagcattaaacgctggcgaagggtcatcgctcttcgctgaaaacgcatcaggctcacttagctttcctcagtggcaaccagcatgtagccaaacccgcgaaccgtgcgaatgcgcgacttgccgactttgtcgcgcaaattatgtatatgcacttccagagtgttggtcgagggttcgttatcccagttgtagatatcgttataaagaatttcccggtgcaccggactgcctgccttgagcatcaaccgtgagagcaacgcgtactccttaggcgtcagggtcagttcctgtccatccctccatgcctgatgacggcctatattgagcgtcagattgccaaccgtcagttcactttcaccctggttattatggcggcgcagcagcgcgcggatgcgggcgtgcaactcctccagggcgaagggtttaaccagataatcatctgcgccgacatccagcccggtaatgcggtcattgagcgtatcgcgggcggtcagaatgagtaccggcagggtatattttttctgtcggattcgcgtcaggaaatgcaggccatcctcatcgggcagccctaaatccagcaccatcagactgtaatgaccagactccagactatgctcggcggcacgcgctgtcgaaacgccatcacacgcatagccttcggtttgcgcggcgagtattaacccctgtaataatagcgtgtcgtcttcaacaatcagtatcttcattcgcttagtctcctgcacggttgcagaatatcatctgcggcctggtaatacgtcgtttgtacgccggttaatcccagcatggttgagaaaagattgtcctgtgaataatccagcgtgctcgcccgtttttgcaggcaggcctgatccacctgataacgctgttgataatctttagaaagccaaatgagcatcgggacatgtttttgcgtatccggcgcaatggaatacggcagaccgtgtaaataaacgccattttcacccaatgattcgccgtgatcggaaagatagaccaggctggtggtgaatttatcctgatgagatttcagcaggttaatggctttatctacaatatagtccacgtacagcacggtattatcataggtgttgatcaactgctgttgggaacagttctgaatttcgttagtgtcacaggttggggtaaattttttaaactgcggtggataacggttgtaataggttgggccgtggctgccgatggtatgtaatacaataacgccatcgcctttcaaatggtcgatatagtcttccagaccgtgaaataacacttcatcgtagcactcgccgtcgatacattgtccgggcaggtttagctcggtgacattttgatgcggaacgcgatcgcatgcgcctttacagccgccgtcattatcattccacagtacgttaatccccgcgcgctggataatatccagcagcccttcctggtgatgcgccagctcttcgtcataatgtttgcgcggcatatcagaaaacatgcagggaacggagatcgcggtcgccgtaccgcaagaggtggtatgcgggaaatagatcacatcgtctttcgccagccgcggattggtgtcgcgcggatagccgccaagagagaaatcatcgccgcgcgaggtttcgccaacgatgagaatcgtcaggtttttgcgatcgcttttcagcattaatggattgcgatgggcatcctcgccaatgcgtaccagcggcaaattcgccagccgttgatgcgaataccatgaccaactggcgacaatactgttcgatgggcttaacgctttgatcaactgtttattatttcgaaatagcgaggcgtaatctttatagaaaaaggcggcgaccagaataactaataaaatagagatcaggacgctgaccaggcggtaaagcccgctacgtaagcgcggcgtcgccggacggattttgacccagaaggcaatcacggctgccagaacgccgcttaatcccagcgtcagcaccatttgcggcgtcatcagcgcaaaggtttccgcgggcgtggtatccatcatattggcgatcatggaacgatcgatgatgatgccgtaagtcaaaataaaatactgcgcggcagcgccgaccagaataaaaacgcaggccagcggtcggtttagccaaataaatgaggccagcgtcagcacactattgaccacgctaaacgcgacgaccggcatggaaataaacaccagtacattgcgcagcgagtttaacggtaggtcttgtagtacctgcttgtagaacgcaatgttcaggcagacggcaatataaaaggaaaaaagcagaagccaggcgatttgcccaagaacaggtcttttaagaaagcgctttaacatgttgatgcgtccatcgattcggtgacgctaatcgtgacaaagtaaaattaagtgaaccttaagaacttaatgttggtggcggccggataacctgcgctatccggcctgttgcgataacattaactacacgtggtcaatcctgtttaaccggcgcatccagcggatacgggtttttgtgaatacggttgtaattcaacgcatacagcgcggtgatcaccatcaacgtgacgaacgaccacatcacttctttggcgccggaaccgatgaccgcccagatgcaatacacaaacgcgacgaaggtaatcagcagatacagcgggcgcgctttaccaaagtgaccgtggcctaacagcaacagcgcggcacaggtgtaaagataaggcaccagggtgaagataaccgacacggaggagaccagaccaaactctttcgcggcgttcggcgacatactgctgaactggaagatagtcatcagcacgccgacgataagcaacccagccactggcgtaccggctttattaacccgcgcgaagatcggcgggaagagaccatcgtccgccgccgcttttgcggtttgaccggcaagcagcgtccagccgccgagagagcccaggcaacccgctgccgcacagaaggaaacaatagcccctgcggtatcgcccagcgccatacgcgccgcgtcaccgaaaggcgatgccgacacgcgcagcgccgcgttggggatcatccccataatcgccgttgtggagagcacatagcagacggcggcgatcagtaccccgccgatggtggcgataggcacattgcgtttcgggtttttgaccacaccggccgcaacggaggcgctttctaccccgatgaatgaccacagcgtaacgttcaacgtgctttgaatcgcgccgaaggtattcatgccgctcacgttccaggccgccatataggtttcgcctttaaaccagaaccagccgaagaccgcaatccctacgataggcaccagcgccagtacggtggcgacggcctgtacgcgggtaatcattttcggcccgacgatgttcagcagaacaaaaatccacagcaccgcgacgcaggtaagcgttaataccagcggatctttcagaatcgggaagaaatagctcagatagccgacgccgataacgaccatcgcgatattaccgatccagcatgccagccagtacagcacgttcgtttgatagcccaaaaacggcccgaagcagcggcgtgcgtaggcataagaaccgccgggactgggatctaaggacgacattttggcataaaccatcgacagcgccagggcgccgatgatagtgaccagccatccgtagattgcaatcccgccagtggccgccaggttggcagggagtaagaatacccctgaacccataatattccccgataccattaaggtgacggggattaggcccactttgtgagcatcagcatccgaagacataatttggactcctgaaaaggtgacttcgttacgataaattacgtcgtatcataccccttcagaatgccgctgaattatgtcggagacgggttatcgccaatgctgttattatcgtgtcttatcgttgagtgtagaaaaattaggcagccgatcgttcccgatgttggctaacataatgcaggggggtcataccataaaactctttaaacacggaaataaagtacgatgtgctgttatacccacacagctgtgagacttgagagatattctttccgtccattaataattggtttacggcataacgcattcggcaggtcgtgattatttggctataactggtattctcgtttttgagctttttctttaacaagcttggactcaggcacaggcagctggcaacggcgctcagattccagtctttatgaatatcgctctgaatgatgtggtaaacgctgtcactgatgcggctgcgcagcatgtgcattaacaaagaaataaattttttgtggtcaagaaagcgggataaaacggtgaaaaggagcgcacgggtacgttcactaacaatttcatccggtgcttccatcgcgctgtagcgggcggcgaccctgaagatatccggcgtcagacagttggcggtcaataagggatcggcgttgcgttgccagacgggaaggtgtgagagatctttattcaggaattgtaaatagtctttaatattattgcgactcacttgtattactagcacgctatttaatgatgaaatgtcaataacgttattttcacaagccagaatggccatatgattcgcttttaagctgattggctccttaccatttactcgtaaccatgtatctttttcggttaataacactatgcaaggttcgttgctgcaaatcctcatacccgaactcctggaatatgaacataaaataccggatctcgccaaacgggagagataacggggactgagtcaattgtgtgatgaattgaaactgcactaaaataactttcctgaataatattacaatatttgtacgatgaattagggtgtacaaaaagttgtacgcgagtggaaacttgtcatttttgtataaaaaaagcgcgggatggggcccgcgcaaaaaggtatgacagtattattgttttgcagcaatactcagggaatacatgccatcctcaaaaaaaagactctttgtgattaggctttcacgcacataacgtgatatacgccatcaataatttccgtgccttcggtttcatgctcaaagccagggaagtgatgatcccaagattgcagtgagcgtaagtaacccacctgcggactgttttcatcgccaaagttttcgccggagagcagcatcgggatgcctggcgggtaaggaataacggagttcgccgcaatgcgacccggtagattttcaatcgccaccatttcaatattgttgttcacaatcgcgttgtaggcgtcgcgcggggtaatctccgcaaccggcagggtggaataggcggcgttgagacgggcgcccgggttatttttacgtagccaggcaaacattttatcgcccaggtcatgaatacccatgttcgcgtaagtgtcaggataatcctgcaccagttccggcatcacctgcgccagcggcgtattagcgtcgtaatgatgtttgaaggagcacagcgtgttgatcagcgttccccatttcccgcgagttacccccatagagaacaggaacataatctgaaagtcggtggtgcgggtcggcacgataccgtggcggccaagccatgctgtgaccagcgcagcgggtacgccggatgcttccagttcgccatcgtcgcccatacccggcgccaggatactgactttaatcgggtccagcatactccagttatccggcaggtctttaaagccgtgccaggtttccccggggcgcatgacccagcagttctggtcggtggctagcagttttgccggcgcgtcggcgaagtcatatgttttaccggtttgtggatcggtgacgacgtctttattccacggtttaaagaaccagtcgccttcatcggtaaactctttataaagacgcgccatcgcctgacggaaatcaaccgcttcgtcaatcacctcttgagtcagggacaggccgctgttaccgtccatcatcgataccgccacatcgttggatgcgcagatggcatataacggagaggtggtggcatgcatcatatatgcctggttgaagcgggagaaattcaccgcgccacggccttcacggacgtgaatgtaggaagcttgtgaaagcgcattcagtagtttgtgcgtggagtgggtggcaaacacggtcggaccgttatggtcgcctggctcgccgcgcatcgcgtagtgatcgcaataaatcgggttgaagcgcgcatagccgtaccatgcttcgtcgaagtgaatgcgatcgctggtttttgccagcagatcctgcgcctctttggcgttatagcatacgccgtcataggtacagttggtcactacgctgtaagacggtttctgtccggctttagttttggtcagtgggctggcgctgatttttttctgcaaggtttcaggctgcatttcctgcgggtagattggcccgataatgccgtaacggttacggcttggcaccatatataccggtttggccccagtgaggatcagcccctgctcgatggatttatggcagttacgatccagtacaacgacatcattatccgtcatacaggcctgcataatagtacggttagaaccggaggtcccgacaaccacggaccaggagcggtcagcaccgaatacgcgggcggcgtttttctcgctttcgccaaacgcgccggtatggtcgaggagtgaaccgagcgtggtacgctcaatccccatatcgctgcggaacaggttttcgccataataatcgtgataaaagcgaccggcaggcgttttagtgaaaccgacgccgccctggtgtcccggcgccgcccatgaatattcatgaatgtcgctgtatttcatcaacgcgttaaacagcggcggtaacagttgctggcgataccgggtcatggcggcaacggcgcgtccggcgataaagtcagcggtgtcttccagaatccaggcgaattcatcgacaagctccagcaggtcgcggtccagcgatgccgtcgctttttccctgtcgcctaacaggaaaacgggcacgttttgctgacgctcgtgaagcttaccgatcaattgcctgacgctcaggtgctcatccggttgttccatttggtagctaaacatcagacagtcaatggcttcgttcgcggacaagatggcatagccgtcatcgaaggatgtcgatttaatgacggtaacattttgttggctcaaggcatccgccagacgctcaaccgcgttgccaacccaggtgtcctgatgcagaaactcactttcaacaattaatactttcatcatcttttacccggttgtggaggccgtgcaatttacgccttgccgacccgccgtatgaatgtgacgtgggcaagtattaccccgtcaaatagggggtgtaaagtgatggaataatggtcagttattgatattattatttaataaacaaagggttaattattgatagcgagcgatttcacccgccgtttatcgacaggtgaattatttttttggctgatagtggtatccggctttagccgggcatcgtctggcgtcgttgctggcttagcttgcggtattgttgcggcgacataccgacaaatttgctaaaagtactgtaaaaacggctgctggatcggaacccggcagtcagagcgacatcgaggatcgttttgtcagtatcactcaataaggcacgtacgtgattgatgcgcatcgccgtgatgtactgcttcatcgtcaattgcataacccgctggaatatccccatcgcgtagttagcattgagtttgacatgctccgcgacgtcgttaatggttagcgcctgatcgtagttatcggcaataaatcccagcatctggcttacgtaaaactgcgcatggcgtgagacgctattcttgtgggtgcgtgatgttttattgagcaaaatgggctgccagccggaaaggctaaagcgtttaagcatcaggccgatttcatcgatcgccaactggcgaatttgctcattcgggctgcttgtttcctgctgccagcgcaacacttcaaaggtgctaagctgctgggtcgccagtgatttaaccaccatcccgtgcgtgacgtggttgataagatcgcgatccagcggccaggagagaaacaggtgcatcggcaaactgaaaatcgccatctggcggcagttgccggggcgggtaagctggtgtggcgtacaggcccaaaacagggtgatatgcccctgctttatctgcacgacttcattgttgattaaatactccacatcgccgtcaaacggaacattcacttctacttgtccatgccagtgactgctggccattctgtgcggcggcctcagttcaacgtccagtcgttgatattcggaatagagcgacagcgggctacgggtttgcttttcatcgccgttgcacatgtgcgggtcgggcgggaggagggatattgcttgcgtactcatcgtgactccatttcctgaattatcagaattatgcccctttagccgggaggaaaccgggaatccggacacagaatccgtcgatattgtagagcgtagcctgactatcaggccgaatactctgctttttacgccattttgtcccaaaaactcagatctcccgcgcgccagcatacgatctgagttttcgggaatgctcatcggggaagacggaggttttcaccgggaacgcgtgccaccatgaaggtgttcactactgttctggagagtcatgatgacggcacccaaaattacctttatcggcgcaggttctacgattttcgtcaaaaatatcctcggcgatgtgtttcaccgcgaggcgctaaagtcagcgcatgtcgccctgatggatattgacgaaacccggctggaagagtcgcacattgtggtacggaaactgatggactcagcgggcgcttctggccggattacctgccataccaaccagaaagcggcgctacaggatgcggatttcgtggtggtcgcctttcagattggcggctatgaaccctgcaccgtgaccgattttgaggtttgtaagcgtcatggcctggaacagacgatcgccgatacgctggggccgggcggcatcatgcgcgcgctgcggaccatcccgcatctgtggcggatttgcgaagacatgacggaagtctgtccgaaggccaccatgctcaattacgtcaacccgatggcgatgaatacctgggcgatgtatgcccgttatccgcatatcaaacaggtcggcctgtgccattcggtacagggaacggcggaagaactggcgcgcgacctgaatatcgatcccacctcgctgcgctaccgctgcgccggcattaaccacatggcgttttacctcgaactggagcgcaaaacggctgacgggacttatgtcaatctctatcctgaattgctggcggcctatgacgccggacaggcgccgaagcccaatattcacggcaatgaacgctgccagaacatcgtgcgctatgagatgttcaaaaagttgggctacttcgtcactgagtcatcagagcattttgccgagtacacgccgtggtttattaaaccgggacgcgaggatctgattgcgcgctacaaggtgccgctggatgaatatccgaaacgctgcgtagaacaactggcgaactggcataaagagctggaggagtataaaaccgccgagcgtatcgacatcaaaccgtcccgcgagtacgccagcaccattatgaacgctctgtggaccggcgagccgagcgtgatttacggcaatgtgcgtaacgaggggctgattgataacctgccgcagggaagctgcgtggaagtggcttgtctggtggatgccaacggcattcaaccgacgaaggtggggacgatcccttcccatctggcggcgatgatgcagaccaacatcaacgtgcaaacgctgttgaccgaagccatcctcacggaaaaccgcgatcgcgtgtatcacgcggcgatgatggaccctcataccgcagcggtgctgggtatcgaagaaatctatgcgttggttgacgatctgatcgccgcgcatggcgactggcttccggcctggttacgccgttaatctccagccgcgctggacggcagatccggcgtttaacctctactaacagaaggcgggcgctggtaacagcgacccggtaccctatgagcatctctctgacaacaaagctgagttacgggttcggtgcgtttggtaaggatttcgccatcggcattgtgtatatgtacctgatgtattactacaccgatgtggtgggactctcggtcggcctcgtcggcaccctctttctggtcgcgcgaatctgggatgcgataaacgatcccatcatgggctggattgtcaacgccacgcgttcgcggtgggggaaatttaagccgtggatattgatcggcaccttaaccaattcgctggtgcttttcctgctgttcagcgctcatctttttgagggaaccgcgcaggttgtgtttgtctgcgtaacctacatcctgtggggcatgacgtataccattatggatatcccattttggtcgctggtgccgaccattacgcttgataagcgagaacgcgaacaactggtgccgttcccgcgtttcttcgccagtctggctggcttcgtcactgccggtataacgctgccgtttgtgaactacgttggcggagcggatcgtgggttcggctttcagatgtttacgctggtgctaattgcgttctttatcgcctcgactatcgtgacattatgcaacgtccatgaggtgtactcctccgacaacggtgtaacggcgggccgcccacatctgacgttaaaaacgatcgttggattgatatacaaaaatgatcagctctcttgcctgttgggaatggcgctggcgtataacattgcctccaatattatcaatggctttgcgatctactacttcacctatgtgattggcgatgccgatctttttccctattacctttcttacgccggcgcggcgaatctgctgacgctgattgtcttcccccggctggtgaaaatgttatcgcggcggatattgtgggcgggcgcctccgtgatgcccgttctgagttgcgcagggctcttcgcgatggcgttggcggatgtccataatgccgctttaatcgtggcggcgggtattttcctgaatatcgggaccgcgctcttttgggtgcttcaggtaatcatggtggcggatacggtcgattatggggaatttaagctcaatattcgctgcgagagtatcgcttattccgtacagacgatggtcgtgaagggcggctcggcgtttgcggcgttctttatcgctttggtgctggggctgattggctacacgccgaacgtggcgcagtctgcgcaaaccctgcaggggatgcagtttattatgattgtcctgccggtactgtttttcatgatgacgttggttctctacttccgctactaccgtttgaatggcgacatgctgcgcaagattcagatccacctgctggataaataccggaaaacgccgccattcgtcgaacagccggatagcccggcgatttctgtggtagcgaccagcgatgtaaaagcgtgagcatgttctctcgtgcaggccggataagccggataagcgtagcgccatccggcaattaaccgataacgcggcccgggagaacgccgggcctgccaagttatttcgcgcagttagcgcactgtttgctgacaatctgctggaagaaatcgttgcctttgtcatccaccaggataaaggccgggaaatcttctacttcaattttccagatagcttccatgccgagttccggatattcgacacactccagatgcttaatgctctgctgtgccagtaccgccgccgggccgccgatactgcccaaataaaagccgccatgttttttacaggcatccgtgacctgctgactacggttgcctttcgccagcatgatcatactgccgccgtgggattgcagtagatcgacataagagtccattcggcctgcggtggtggggcctaatgagccagatggataacctgccggggtttttgccggacctgcgtaatagatgggatggtctttaatatactgcggcaggtcttcgccggattcaatacgctcttttagcttcgcgtgggcgatatcgcgacctacgataatggtgcccgtcagcgacaggcgagtcgagaccgggtactgcgatagctgggcgaggatctctttcatcggacggttgagatcgacttttaccgcgtcgccttcgcccgcctgacgcagtgctggcggaatatactggcccggattgtgttccagtttttcgatccagatgccttcgcggttgattttcgctttgatgttacggtctgccgagcaggagacgcccatccccaccggacaggaagcgccgtgacgcggcaggcgaattacgcgaatatcgtgggcgaaatatttcccgccgaactgggcgccgaggccaagtttttgcgcttcttccagcagttcctgttccaggtggagatcgcggaatgcctggccgtgctcgttaccttccgtcggcagcgcgtcgtaatagtgggtgctggcgagtttaacggttttcagcgtgctttccgccgaggtgccgccaatgacaaaggcgatatggtatggcggacaggccgcggtgcccagcgtgcgcattttctcaacgaggaagtttttcagcttgcctggggtgagcagcgctttggtctcctgatagagatacgttttgtttgctgaaccgccgcctttcgccacgcaaaggaacttgtactcgtcgccgtcgacggcatagagatcgatttgcgctggcaggttgctgccggtattgacctctttgtacatatccagcggcgcgttctgcgagtagcgcaggttatcttcgatataggtattaaacacgcctttggagagcgcggcttcatcgccgccgcccgtccagacgcgttggccttttttacccatgataatcgccgtgccggtatcctggcaggtcggcagaacgcctttggcggcgatttcggagtttctcaggaattgcaacgccacatatttgtcgttttcgctggcttcggggtcatggagaatggcggcgacttgctgctggtgttcaggacggagcataaaagacgcatcatggaaggcttgctgagccagcaatgttaacgcctgcggctcaacgttgaggatagattctccattgaattcactgacgctgacataatcggaggtgagcagataatactctgttttgtcctctcccatcgggaaaggcgcctgatagataaactcttttttcgacatgtgcttccagcctaatagtaagaaaatgtattaagagcctcacgggccaggctctaagtcgcgcgccgcgcataaccgggcggcgcgcgcggccattacaggaatccgtacattgcggcaaagatccagccaaagacgcaggagacgctcacgccaatcaaacccggcagaatgaagctgtggttaatgacgaagcggccaatacgggttgtgccggaacggtcaaactgaatcgccgccagatcgcttgggtaggtcggcaggatatagtagccataacatgccggcgcagaggccacgatatacgccggatcgacaccgatagccagcgcgacgggaacaatcgccgccagcgccgccgcctgggagttaacaaacttggagaccagaagcagaacgatggcataggcccacggatactctttgaccatttcgcccagcacgccctgaatttccgacatatgcgcgccgaacatggtttccgccatccaggcgatcccgtataccgcgacaatcgcaatcataccggaacgaaaaacttcgttttttgagatagacgcaggattggttttggtcaggatgataatgagcgccccggtcagcagcatgaacatctgaatgaccagcaccatcgacaacggtttgccgccgaaggttggacgtaagtcggagtccgcgcccaggagagcgaccacggcaatcgccgccaggaagatccacatcgccagccagttgcttttcggcagttttttatccagcagcgtcgcggtatcgccgtacacgtactgacggttttccggtacggaaataaatttctgaaacgcttcgtctttatccagatctttaccgcggaaccaactaaaaataccgattgccaggataccgagcagggtagacgggatggtgatcgacagcagatcgaggaactccagatgttttccgtcaaatgtcacgttgcccagcatcgctaccagagaaaccacggcgacggaaaccggactggcgatgatgcccatttgcgcgccgatagaactggccgccattggacgttccggacggatattattcttgatcgccacgtcatagataatcggcaaaatggtgtagaccacgtggcctgtcccacacagaatcgtcagggtacaggtgacgaacggcgccacaatagagacgtatttggggttgcggcgcagcagcttttcggcaatctgcaacatcacatccagtccgcctgacgcctgcaacgttgccgacgcggcgactaccgcgataatgaccagcattacgtcaacgggcggtttacctggctggagatggaaaacaaacaccagaatgaccagaccgataccgcccaacaacccgagcgcgatcccgccctttcgggcaccataaaacagacatattaatattatgagaagctgtatactaaataacatttttatttatcctcgcgataaacccagtcaattttgataaatggatcacagccatcttctgatttgtgtgaatgagcatcaggaaatggcgaatattcaatgcgccagtggcgacgattaacgattaagctttttacagagttgctttaagtaattattttcttgcgatagtgatgttcagaggggcgtaccctctggcgatgggcaggtggagtcagcgagagcagtaaattatgatttgtctgttttaaaaacaggcgtttattatttaatttttgtgtctcgccatcaggtaaatcacgagataaatcgaacagaatgtgacttatgtgatcattgtcacgccatttttttaaattattagtatggcgtgtggagacgcgtatctgctcaccaatatacgtattgtccataggcgtagcacaagctccattgctacaaacataattttatttaagtgtcaggaaaattccggacaaatcccttttttaataaaaatacacactctcggcatgggataatacttaattaacttttgttagcgttttgaaattaaaaacagcgcagagcgctgtaataatagaaaataacgttaacaggcctggggtgagtatatttgatctgacacaatttcccaggtttgttattaatgtgatagcgtttttattggcattgttataataaatgttaccaggatataacgcttcgcgtcggctttatgcggtatccttactgacaatattgtttcagtaaagagtaatgttccggctgaacgcggtagcggtaaaccggcctgccggtcacgccgtaatgaatactggtaaacaagatatggcaattcaccagccagatgagatatttacggcaggagacgcgcgagatattcacttcgttggccaactcgtcggtagaaaattcctgctcctgatgcgcatcaatccactgacataaggtgcgtagcgtttgctgcgtcagcccttttggtagccgacgaggctcctgctcgctggatgaattaccgtgaatgagcaggtcaagctcagactgttcgtaatactggcgtttttccatcgccgttttcttacgtagccagccggtcaacgcttcttcaaagcgcgtggcctgaaaaggcttgatcagataatccaccacgccgtagtgaagcgaatctttaatggtggcggcgtcagcggcagaagaaatgacaataacgtcgcttttgcagcctgcgctgtgcaggacaggcagcagatccaacccgttttcctgctgcatatagatatccagcaggattaggtcaatgtgattttcactgttgaagataaactctttcgctttttccagcgtcgaagcggttccacaacaatgaaaaccggagatttgcgcgacatagcggcgatttaactccgcgaccatcgcatcgtcatcgacaattaatacattgatcataggctggtcctttttccatcccagggtaactgtacaaaaaattgtgtgaagatcccaggctcggactccacggaaattacgccgccaagtgcttcaacctgctgtttaaccagcgctaaaccgacgccgcgttcggcgcctttcgacgagacgcctttttcaaaaatcgcctcgatgcgctcaggttcgatacccggaccgtcatcgctcacttcgcaatgcagccagccatgacggtagtgtaacgagacgctgatttcgccgccggattcctggctcaacgcttccagagcgttttcaatcaaattacccagcgccgtaatcagcaccgtaacctgatcttcattgttattatccggtaactggctgtcgctgcttatcaccaggctgtgcccgaaatcagaggcacgagtaatcttactgagcaaaaagccagcgataatcggcgactttattttacccagcagcaaaccgatctcttcctgatagttattggccgtcttgataatatacgcttcaagctgcttataactcttcaggtgcaataatcccagaatcacatgtaatttgttcatgaattcgtgggatcgttcacggagcgcatccgcgtagttcaccatcccgtccaaccgctgcatcagttggcgaacttctgttttatccctgaaggtggatatcgcgccgataatttcgccgttgctgcgcaccggaacggtattcaccagcagcaggcggcctttgacgatgatctcttcatcgcggcgcggcgtaccgtcacgcaacacttcgctaatgtccactacctgcgaccaggcatggctcagggtggataatctggcgtcatcctgcgtttttcgataatcgagcagcgcctgcgccgcatggttaatcaacgtgacttcgccgctatcatccacggcgataacgccctctttgattgactgcagcatcgcctggcgttgttcaaacagggttgagatctcatagggttcgaggccaaacaggatacgtttcagcaccttgaccagcgcataggtgcctaataaccccaccagagcgccgaacagaatggaccagataatactgccgcggctattgttgatctgctgcgtaacgtgactgagttccaggccaatcgctaccacgccgatctgccggtggcgttcatcataaaccggtgtgaaaacgcgcagcgctttggcaagaaagccgcgattaatggcaacgttttcctttccctgcagcgcgagcagaatatcatcgcctttgaacggttggccgattcgctgcgtttctgggtgcgaataacggatgccctgcatattggtcaccacaataaacaaaaagccattatgctggctcaccgcttcggcgagcggctgaatgccgctttccgcaggcggttttttcagcccctcgcgaattgccggagagtccgccagcgagcgagccaccgccagcgctttatctgccagcgcgtcgcgcgtcatgctgctgatttgcgaaaaatagatcagatggaccacaacgagcaccgaaaacaaaacggcgctgaccatcagaatgacggtagtgccgagtttcatggggcgtttgcgtaacgcccggcatggcagggagtgtttcatagtggacctgagcggacgaatcgtaaggttattatccctgatgaggcgtctaattcaaaggcataggcgatgttgctccagtgttgaaaagcccgtcttgccttgcagggggcgctacctgctcatgtcgactggcaaacgtcatgtcgttaattaatatcgccggataccgtgatgggtaatttattttcatcagaattacataaaataatttttcattaatttttataataacgtatgcggtatcacattttatttttactgacgttcagaatgcgtttgatcacaatcaatcagcgctaatatttaatctattatgattagttttcattacatattattaataattatggaagcaatgtgagaaataaaaaatggaaataaaaaaatggctgaacacaaccataacccgacgtgatgctattgtcgctactgcaaaagtaggggcggcggtgacgctaagctaggcgattacgctgccttttgctaccactgcccaggcgcaggataccccgataccgaaggatgccaacggcgaaaccgtcaggcacagcgcctgtctggtcaactgtggcagccgatgcccgcttaaggttatcgtgaaaaatgatcgcattgtgcgtattgaaccggaagacgcgaaagatgacgcggtattcggcgagcatcagattcgtccctgcctgcgcgggcgttccagtcgctggcgcgtctatagcccggatcgcattaagtatccgatgaaaagagtgggaaaacgcggcgaaggaaaatttaaacgtatttcatgggatgaggccacagcctttattgcggcagaattaacgcgcgttagcgaaaaatatggccgggaagctatttattataattatcaatccggcgcgtattatcacacgcagggcagacccgcctggataagattactaaatctcaccggcggttatttaaattatcacaacacctattccacggcgcaaatcgccaccgccacgccttatacccacggtgattatgtcggtagccattttacgcagatcgcgcattccgatctggtggtgctatttggcctgaatctctcagaaacgcggatgtccggcggcggtcaggttgaagagctgcgccgggcgctggagacctcgaaagcccgggtcattattatcgatccgcgctataccgattcggtgattaccgaacacgccgaatggctaccgattcgcccaaccacggacgctgcgttagtcgccggcatagcgcatacgctgattaccgaacagcttctcgacgaggcgctggtaaaccgctattgcgtcggctatgaccgtagcaccttgccggacacggctgcgcctaacgccagctataaagattatgttcttggcacgggcgacgacggtatcgcgaaaaccccggaatgggcggcggatatcaccggtattccggcaacgcgtattcgccaactggcgcgcgaaatcgcctcggcgcgcgcctgctatatttgccaaggctgggggccgcagcgtcatgccaacggcgaacaaaccgtgcgtgctattcagacgctgccagcgttaaccggccacttcgggcggcccggcaccaacaatggcaactggccttacggtacgccgtatggcgtgccattgttgcctgtcggtaagaatccgatcacaacctctattccttgctatctgtggacggacgccattcagcatccggagaaaatgaccgcgacgacaatgggtgtgaaaggcgcggacaggctaaaaaccggaattaagctgtttttcaaccaggccggtaataccttgctgaatcagcacggcgaaacgaaccgcacccgacaaattctcgcggatgaatcgctgtgtgaaaccattatcgtgattgaaaaccatatgacgcccagcgcgatgtatgcggatctgctgttgccggagaccagctatcttgaggcggaagacctggtggacagctcctatgcggcgggatcgcataactatatgattgcgattcagaaaaccgttaaaccgatgtgggaagtgcgcagcacgtatgacatctgcgcggatatcgccgggcatcttggactgcgcgagcaatataccgagggccgaactcaggcgcagtgggcggagatgcactatcagcagatccgtgaaaaacgtccatacctgccggagtggagcgtggcgaaagagatgggtgtgattgaccagcgtatcgctaccgagcagcagagccttgcgtttgccgatttccgcgccgacgccgaggctaatccactctccacaccgtcgggcaaaattgaaatttactcccaggcgctggcggatctggcgcaaacgtggacgttgccagaaggcgagcgaattcccgcattgccggaattttgtccggcgaaagagtcgcaccttaacaaagcgctgacggcgaagtatccgttgcagttaagcggcttccataccaaagggcatacccactcgacctacagcaatgtgctgatgctgcatgaggcggtgccggatgaagtctggattaacccgattgacgccagcgcccgccaactgaagtccggcgatcgggtgcatgtattcaatgaccgcggcgtggtggagcttccctgtaaagtgacccagcgcattttacccggcgtggcggcgatgccgcagggcgcgtggacgcggcttgacggcaacggcgttgatgtcggcggctgtatcaatacgctgaccagccaccacccttcgccgctggcgaaaggcaatccgcagcataccaatctggttgaaattaaacgcgcttaaggagtgatgtacgatgaaacagtatggcttttatgttgactcctcgcgctgttcaggctgtaaaacctgccaggtaagctgcaaggataataaagatctggatgtcggtccgaaactgcgccgcgtctatgaatatggcggcggaagctgggtgaaagagggggaaagctggcatcacgacacctttacctactacctctctattgcttgtaaccattgcgatgagccggtatgtgtctccggctgtccgaccggggcgatgcataaacgcaaagaagatggtctggtcgtggtggatgacagcgtatgcgtcggctgtcgttattgtgaaatgcgctgcccctacggcgcgccgcagtttgatacgcaggcgaacgtgatgcgtaagtgcgacggttgtcttgaccgactggagaacaatctgcgccctatttgtgtggattcttgcccgcagcgagcgctggatttcggccctgtcgatgaattacgggcaaaatatggcacggagaatcaaatcgcgccgctgccttcggcgtcgttcacccatcctaacctcattattaaaccgcatccgaaagcgagacccacgggcgatacggaaggcgcaatcatgaacattcgggaggtgcgccatgcatgagttaccgctggtcttttttacggtctttacccagagcgcggtcggcgcgtttattctgctgctgattggcggcgcaatggggctggtcgcgccgcggcgtaaggctatcggtctgttctcggtgatgtgcctgtttgggattggcgtcgttgtcggcaccttccacgtcgggcaaccgctgcgtgcgctgaatatgctgctgcgcgtcggacattcgccgatgagtaacgagattgccttgtcggcggcttttgcggcgctcggcggtctgggggcgctcggtttattcctgaaccgtgcgacgccgctgtgtaacgcgttggtctggttggcggcgatagtcggagtagtcttcttatacgccgttccgcagatttaccaactgccgacggtggcgacctggcgttcatcttacaccacggcaatgatgatattgacgccgttgattggcggcggcgcgttggcggcattgtttggcgtgcgccgtctggggctactggtcagcgtgttggcgattttggtgagcttttgtctgcgcccgggctatatggcgacgctgatgagcgccgatagcgctctgaccgctgcgcagcatagctggtttaccgcccaggcgatattgctggcggcgggcgtggtcggggtggtggtctgcgcgcgcctgaaatcgagcgctgcggtgctggccatgacggctgtggtggttatcgcggcggagttggcgggtaggattgcgttttacaatctgtggacgctgccaatgtagtttttgcccggcttgtgccatgtaagcctgatcagcgtagcgtcatcaggcgaaatatttcaggagctattgctatgccttcccgtgctgttttgccgcgtatcctcggcgcactgttttactactcccctgagaggccggaggtgaaagcgttgttcgattgtttgccaacgttgcctgagctttacccctggcgcgatcgcggacctattgaatcactgtgtgcgtcatggtcgctaccggatgatgatgcgcttacatggcaattttccgtgttgtttgaaggccagggaaagatgcccgtcccgccctggggatcggtctatctggaaaaagataatttgctgatgggggaaaccaccgccgattatcgagcttttttacagtcgcagggaatggtattcactgaccgtgaacgcgagccggaagatcagtttggcctgatgctattagcctgtagcgatctgctggcacgaggcgacaacgtggcggccaaccggttactggaggcgcatctgctgccctggggattccgctatctggaattgctgcaacgcaataccgttagcgccttctatgcccggcttgccgtcatagcgacctgttatctgcaggatgttcagcagcaacagggactacagcctgagaataaacggttgtttttctgaggtattggtcaggttttgatgacgtgccgtaatacttgtgccgccattgtgcccgctgttgcgtcagcgggcacagtttactattacagctccggcgtctttttgaaaccggtcagcatcagcaccaggctctgttttgagtccgctggcgtgaagtcgtagtgatttccctgacggtcgccgccgatataccaggatatttccgttttcccttccgccagcgctttgcgcaccgctttatcgacatcaaccatgcgatactcatgtgaatggtccagatataacacggcatcggaacggtagttgatcgccggtttattgttccaggacacggtactgacgtgccagtcactgctggtcgggtaaaagaaaatttgatcggcgccgttcgtttccgttttgccgccaaaaaggcgaatacggtatttgaatagcgaagtgtccatattggcaggcaggggcgggatcttaaatttcaccagcgtgagcgtttccgggtgctgcgtgcgtccgccatttgtccagtcatcctgtacgtacaaggtatcgacgctggcatgaggcttgtcgtcttcgctgcttacccaggtattttcttccgctttactgtaggcgtaaggaaccgtagtgccgcaatccagtccctgattcatacacagatccgtcataaactgcgcgccatcttccgtccagccattcataaaatcggcatgggcggtataaagacttccccagcgctcttcccgggtttcgccatgcattaccgggtccatcgacaattccactttggacgtatccagcgaggagatctgcgggagtacccaggcgatgttcatattcaccgttgggattttgaccggatagtctgcggaacatttcccgtggtcggcatagatagcgttattgtggctatgggttggtttcaggttgacgccatcccaacagttggggaaagcgatcccgatattaaactggacggcatcgcccgctttacgcaggccgcatatttcgcctaccttgttggtgtaacctttgccgttggcacataaaaaggtgattgcggtactggggccagtaccgtgatgatcgcctgccagtaactccagcccggccgggaatggatggagcggatattgcgctacatttgtggattgataataggtcttttggtaggtcggatttacgatttcaccatcgggtaatttcatggacggtgcccagtaagcggagctgtcggctttattatcacaggtggtatcgggttgcgcgcgcaacgtctggtaggtagagaccgcgtcggtgtgggtgttgccaaaaaagtcatgccacatcgcctgattcgctttaccaaacatcataatcgcgtcatcgcccagcgtgtggtgatagccgcacacgacatgcgcctgaggaccggcatgggccgggaatgcgccagcggcaacgagcgtagccaggctgacggtaataaggttgagtttcatttttttgctgcccggttgaatagaagtggaagcagcaatagcagatcagattgcggtgttacatctcattaattatcactttttgtcattcgtcctgcatacagagaagaatttgcagacttactatttaaataattagccgaaactaccctcctcttgattatgtcaatttacaaaaaggggacgttagtgattaaaatcgggctttttgtgataaccctcactatttcattttgcctatgctaatggcgctcgccataaccgaataacgattctatcggacatcggctttatttttaagaaatgcgttacgacatcagtcgtgacgcgatctgctatggattttttatgagattactaaaacgcgttattgtggttgtactcttgggcgtgattttatttatggtcagggacgatatacgctatgtttatcaactgatcctcaaatatggtgataaaccctcggcgctagcactgagtagctataaagcggttattcagcaaaaaccagtcgcaggagttaagagtaacctttcaggtttgacctactccgccgaagacaggatgcttttcgccgttattaataatccccctgaactggtctggttaacgacagaagggcagctggtaggacggatgccgctgcagggcatccacgacccggagtctattgcatggagtgggggcaaccagttccagataggcagtgagaaagatggcgcggtctataaaacacaggtggatattcagcgcggcaccatgcagataatctccatggtgaagcttgagggctatgacaaagcaaaaaataaagggctggaaggtacggcatgggatgcgaaaaatgagagattatatgccgcaaaagaaagaaaacccattatgatcaaagaagtagagatgagcaaaaatggtatcaccagagcgttgccttctgccatcactgcgagtgtgagcgatgtctccggacttgaataccatgccccaacggattcgctgctggtgttgtcggacgagtcaaaaatgattcttgaggtcagttccgagtggcgggtgcgcgatcgattgttcctgacggcggagtggtcagggctcagagacgatatcccccagccagaagggattgccatggataatgaaaataatttgtatattgtgagtgaaccaaatctgttttataaattttcgtgtgatatacagaatgactaaaatctatttttactgtcacagtatgctaaaacagaacaaggttattaataccatgatttgacgattgtttgattcgttgattcattgttggggatatttatgttttacttacctcagtaacggattactttgtggtgtagcgtaacggtaattgtcctcctcatatttgcggcagcgtagtctgccgcttttttttataaattaactctctctgtaataattaacagacaatgaatattattctgttttttcagcaggcctccgaagagacctcgcatggtgatgtttagttatcaggcataatattcttcatcaacacttaccgaatgccatgtcgcctcgctaagcgaaatcatttcatctacgccggaactcttgttaaccgggtttttcgtcggcgatgtgcctgtaaatgttccactggcggcggcgctattaccagcgggatcggtggccgttatggtgtactgatttgcccccgacagaatagcgggttgcggaacagaaacatgtcagttactgatatcgttatcgatactggcggtgtagtccgtatcgttgaccgtgaccttcacctgaatatcctgatgcgcctccacgactcccttaagggtgacggtgttatccagactgttaacagtcgatcccaacgttggttcggcggacggttgtgtatcaatagtcagcttaattgttgcgtgagcttctgaggagccgatgaaggtcggtgtattgatgttagtgatattatcgcctctggcgccaatatcactattatccttcatggaacgtactggcggtgtagagtctatcgtcagccagccgatagacagcgaagaattatccatagcgtttgcggaacgaacactgattgatcagctttcattcactgctgttcccggagattttatgggtattatcggtacatcaggttcaggtaaatcttctttaatcaaagcactatcaaattccagtcattgctatacgggaacagttaaattaaacaacgtagatatcacaccgatctctgaagatgatatccagagttgccttgcctaccactctaccaacattctaggaaaaattacgtaatatcgactgatatataaaactcattcagcatcaaatggattaattcaacatcagtagtaatatccatttttttataggctgatctcttttgtgttgaaatcgtttttatatttcgatctaataaatttgagcaacttttaacagataatcctgctgccacgtaataaataacttttttttcgctcaatgttaggtcgaattttttagcgagcaacagaatcccgtcttttatattaatatgttttgctttgttcttatactgcattgtcagatatctcaattaacatattgatgacgagaggaagataaaaacgctaaaaattccgatggtgtagttttgaaatgttttttaaaaacgcatgtaaaataagaagcactatcataaccacacatataagccactcgagtaatattatattcactattgcgtagaagttttgtcgctttattcattcgcgcattaaggtaaacttcgctgaatgaggtgttctcttgtttcaatttcctttttaatgtggaacaactcatatagagtgagtcagaaatatccttgagcgcccattttcgacttatgtcgcttataataatattatagatattttcggctaatgtattttgcgatagttctctaaagagggcaaatgcttcaggttcatagatgaactctgaaagtagaaatcttattaaatattcctttttatcttgggataatttctggcttttatttgaagagtgtaaaaggttgaatactcttgctacgcctgtttctattggcgctaacagatgttttgtcgtcggttttgttaatggggccgaaaagtctgcatgttcatacagaaaaaaattataagcattttttattgacgcagaatctaattcaattaaattataatttaactgttcatgagtctcttccatagtgatatgaatagtttgatctttagctaaaaatattaacattggccctgatgccgtaatatactccccggacgatgtcgtaattgaaattttacccgtggtgagcttgatgagtacggactgcagtaaatttaatccctgaagtgataaggatttcctctgccagttttgcgctgattgtaaacattcaatgctccccacctggacaggtgagggattaaatacttttagcatgataatttccttttattaaatgtgcgtgtaaatcaaaaattattctgaaaaatatttcaaaagaaaactaatatatagctatataattatttgcgaacttaaggtatcaggtggcgatcttttcattttctatggaaaatgctattttatattgcatttctacatattatagtatcgttaaaaaactatgtcgcgtataaaaaaaagatggaaatttacaagaattggctcatgttattatcaatttatctctttaaaatttgaattaagtaataattgcctttaatcttttagagaatagctctttaatttcatggaggtagttagcatgaggtataagatctgatgttaatttgtgataaggtttatcctggatgtaaatattaacgctctcggccaggaaaggcatacaacgcggtaaatatatactgcggcgggtagacggtgtagcgatatccggaagtttgaggggaggggaagcattcaatcgtatggttggctttatgaaaaacggtgtaacacgttattgaggttcttactgtgcgtatccgttaggtttatgctttctgattatataatgttgcgtgttttggcacggcagtattgaatcttttgctgcgtcggccccgaggaggaatcactcacagcgaatgccagcgcacagcctggtactgaatctctaaatgagtagaaaacctttcggttcgatactccggttctattccttctaaatttatcgtaatgacatctgcgttacgcgtgttgtatacttaatatccacagaagtacaagaggacaacactatgccagccgcaaacagtatggcgatgaaacgcgaaaccctgaacctgcgtatcaaacccgccgagcgcgatcttattgatcgagcggcgaaagccagagggaaaaaccgcactgactttgtgctggaagctgcccgtgctgccgccgaggaagcgctgatcgaacaacgcatcattatggccgatccagaggcttatcaggagtttctcgttcgtttggatcaaacaccttcacctaatgccgcactgcgtaaaaccatgcagacccctgcgccgtgggagcaggaaaaatgatctccacccctgagccgcttcatgccggacatattcttactccgttttgctgcggtgtggattctatagataactggctgaaacagcgggcgatgaaaaatcagaccactggcgcgtcccgtacctttgtgtgttgtggcagcgattcgaacgtactggcctattactcgctggcgtccagcgcggtcacgacgaatacctcccccggtcgctttcgtcgcaatatgcctgacccgattccggttgtggtattggggcgtctggcggtggataaatcgcttcatgggcagggcgtcgctcgggcgctggtacgcgacgcagggctgcgggttattcaggtggcggagactatcggcattcgtgggatgctggttcacgccctgtcggatgaagcgcgggaattttatcagcgggtggggtttgtaccgtcgccgatggatccgatgatgttgatggtgacgttgggggatttggtggagagtgtttaaactccagaacgcatcccttagcttctgatggccggaattcgctgtggatagtcagtgagccagaccggttttaccgcttcagccggacaacgacgtcatgacggtctggacggactgcaaacgggggaagggggcgttgaattcatgcgaatcggggaaaccaaaggcattctccacgcccggccgctcctacgcagttgcacttcctttcatttgctgtggccagtttgcgggaagactttcaccttcagtaattaagttcggggtgatcttctttactcaataaattatttttgtcgttcagctcctcacggacttttgccagtgacttctgaaatgccgggattgtttgcagtcttgcaaactctactgctcccacataacgaccagcatcaacatcgctttgccagtgagcaccgcatatcactctgctttgcccgaactcccatcctcgtctggcgagctcctgcgcgcgttccggtctggcctcggataatactaatgccagaagtgtaccataagcagtatgcccggaagggtaagagccatcttttcgcaaagtattctcatcttcaggacggcaggtggaatgattaaataagacaaagggacgagtgcgcatataatatttttttgccgaagcagtagcgtagtagccgcccattgtcagaagattctgtaacatattccaggtttctggcgtatctttgggattaattttagcacccactactggcgagaatattctggctatattttccacgcttacatctgcatcctcagcagcttgtttccatcgcggggaactctttatcgcatagcccttaaaataagcctccttatcatagcggaaagccggatcatcattacctggcggtggtggtaagtagaactgactgttcactgattcttcaggagaatgaaagggttgcactgtttctgctgatgtatatttagctacgatcagtggtagaaaaaatactaaataacgacttttcataaagactcactccggatcaggcaataataaacagatgtaatcctataatgatttattgcaatggttattcaacatacaggtaaaaaagcaggacgctgcactggtattattgtctgtccataccggactgactgtagcggacaacagaacaataccggtacttccggctaacagcattttgtttaaattttctccccggttgttttttatctgcgtgcctgactgacacgcattaggttaaaatctttccgtaataacaaactatgaataagtattttaaagtatgtgctctgttaccccggtaactaccatcagtcatgatgtgctgagtattaatttatgattatgaacaagagtcggaaacagtatttaagaataaagaagccgacaaagaaaaaatgccaaaactggcgaagggattattgttttcagtgatgaaaaagttcatggcggagatattggactcacttgtcggggttagcgaaccgtcagatgaagtgataggcgttattactggtaataatctccctgtagctaagtaagcttttgaccctagcccaaaggtgagcggctgatcgacgaagcgctgggcgttgcgccagagaaaatctggccttctcgttatagctagtcagaccagagatgggggctacggatttccattcccagaaaagcaaaaacccagccataggctggattttctgaataagtggtgcccggactcggaatcgaaccaaggacacggggattttcaatcccctgctctaccgactgagctatccgggcaacggggcgcattaaaccgtaaaggggcgcggtcgtcaacggctttacacgaaaaaagtgataaaagcgcgctgactgcctgcttttcaggcaaaatgcataaaatcagtacccgtcaggtgagcgcgccaccctgacggcactgtgcaaaacgcagaatatcttccgccaaccgctgagcggtatctacatcagcctgactgcggttgaccagcattcggctgagacaaccttccagcacgagctccatctgccttgcgaccatcgccggatcgtcaatttccagcgtggtcagtagctcatgggtaaaatcatgtgccgcgcgtttttgttgattggccagttggtgaataggatgggttgggtcgggataaaacgtacaggcggcaatgaacaagcaaccaggataacggttattactgacacattccgaaagcgcgctgtagcgtgccagtagcttttgttcagcagaaagcgtctcatcaagaagaagctggcgtcgccagatatctacctgctgactcagataacgtagcgcgtcatataaaatggcttctttatctggccagaaacgctgtaatgtgtcgagtgggcgatttacgcgctccgccaccatttccagcgtagtatcggctatcccttgcgtctccagtaatttcagggcttctcccagaatatcttcacgttgcacggtattctcctccgtctttgcttttgcaagtgtcgctcacggttggcgatcgtgcaaatgcgcgctaaaggtggcggcgtccataaagccggtgactcgcgattgcggctgttcctggccttgggcattaaagaacagaatggtgggcagcccgaggacttgcagatgctttaacagcgcgacatcctgcgcattgttagcggtgacgttagcctgcaagagcaccgtgtcgccgagcgcctgctggacccgcggatcgctgaaggtatacttttcaaactctttacaggccacgcaccagtcggcgtagaaatccagcataacgggtttgcctttggcctgcgccagcgcctgattgagttcgtccacggtagaaatagccgtgaaattgaggtgcgctggagcttgcgcggatggcgatccgaacgcccaatcctgtagaggccgcacgctaatgagcgctgccgccagcaggataatctgtacgatacgcatccacgctcgtctggcctgaaggctggtgataaaggcccaaccaaagaaagcgacgcccagcagcgaccacagacgtaaaccccaagcctcgccaataatccgctccagtaaaaagaccggtaacgcgaggatcacgaaaccaaaagcggttttaacatgcgccatccacgggccgcttttcggtaacaggcggttgccaaacacggtgaccagcattagcggcagacccatacctaatgcatacaaatacagcgtgccgccgcccagccacatgttgccgctctgagcgatataaagcagaatcgcgcttaacggcgctgtagtgcagggcgagcaaattaatccggcaatcgcccccataacaaaaacaccgccgggcgagccgccttgctgacgattactcattaatgtcagccgggtttgcagtgaggaggggagctgtagtgtgaacaggccaaacatcgacaacgcaagcagggtgaacacgatggcaaggccgattaacacataagggtgctgcagcgccgcctgaaactgtaatcccgctgcggcgacgaccagacccagtgcggtataggtcagcgccatcccttgtacatagataaaggccagcagcagtgcgcgccccgtcgacaaacgttgccttccccccaggacaataccggaaatcagcggatacatgggtaaaacgcagggcgtaaaggcgatgcctatgccgatcagcagtgcccagagcgcggaaaaaggtagctgggcggcgggttttgacgtctcactcgtctgggtgacagcaggcgtcggcgtggcgtctattgccgcggcgacttcacttagcggcaccgttttcgtttccggcggataacagaatcccgcatcggcgcacccctggtacgttatcgttaatgtcgcgccagccgccgcctggttaaccgttaccggaacgtttagccgcttacggtagatttcgcttttcccgtagaactcatcttcatgccagacgcctgccgggagttggactgctgcgatatccgctttcgtcggcgtgatactgatttgtttacggtaaaggtagtaaccctcttttacctgccaagagagggtaagatcgtgttgattttgctgaaaatcaaaaacaaacgcccggtcggcagggacgaactgcgagcgacccggcgcgtcgaataatccggcgaaggcggatgtgctgcacagcagcaggatcagcgtaaagatgcgttgagccatgagaggtaatcagtatctccgtgagtaacaggtaaaaccagaagttcaggcgtttgatacgggtgatgagacttcaggcagtcgataagcgcttgctgatgtgaaacggtggtttttaagatcatttgaacttcatactcctgctccagtttgccttcccagtagtacagcgatgtcgcgccggggaggagggtggcgcaggcggccagtttttccgccagcactttggcggccagatcctgggcggtagcttcatccggggcggtacaaagcaccacaacggcctcggggatggaaatatcctgactcttaacatcaagcataaacacctcgaaagaacaaaaagacccgcaagtgaacggtcactatacaacggacgagggcaggatgttagtcaaagggcgggagaatgcggggcgtgatacgccccgcgggtgaaacacttacagcataaagctgcccagcaggaagccgaagcagacagccagaacgacgcccagggtgcctgggatgaagaacgggtggttaaagacgaatttaccgatacgggttgtaccggtgtcatccatctgtaccgccgcaaccagagtcgggtaggtcggcaaaatgaacaggccggaaacggcggcgaaggaagcgactgccgtcagcggagagacgttcagcgccagcgccatcggcatcagcgctttcgccgttgccgcctgagagtagagcagcgcggaagcaaagaagaagatgacggccagcagccacggatgcccctggatgacgctacccgcagtgtctttgatccagtcgatgttagcggatacgaaagtatcgcccagccacgccacgcccagaatacagatacaggcgctcatccctgctttaaaggtactggagttgaggatggcgtcagtttccactttacacaggatggtggtcagcgttgcgacgctcaacatgatgatcaaaatagcgttggtggtgttcatcagcggtttctcaaccaggccgaggctcggactgttaacaatcgcataaacaaccacgcaaataacgcccagcaggaacagccagacggaattttttgccatcggtttgatttcaatctgcttttcaccacgcagttcaatcagcccttcttccagacgcttgcggtaaatcgggtcgtccgacagtttggagttgaacagcatcgtgaccaggaaggacatcaccagcaccgccagcagcgtagaggggataaccacggacagcaggtgaatgtagctaatgccatgaccttccataacagaagacatatacaccacggccgcagaaatcggcgaggcggtaatcgcaatctgcgcggataccacggcggtcgagagcggacggcaaggtttgattccctgctccttcgcgacttcagcaataaccggcagcgttgccagggaaatgttcccggtaccagcaaaaatagtcaggaaataggtcacaatcggtgcgaggatagtgatgtatttcgggttcttacgcagcagtttttccgtctggtttaccaaataatccagaccgcccgcgacctgcatagcagagatcgcggcgataaccgccatgatgatggaaatgacatcgaatggaattgtccctggcttcacgccgatggcggcaagtaccagaacacccagcccacctgcgaatccaataccgatgcccccaagtctggcgcccaaaaagattgccagcaaaacaatgataagttcgacaactatcatattagccttccttgttgtttaacaagttgatattaaattgttgttatttggtaacttcttgtaagaaaaaaggcacgtcatcgtgacgtgcctctttggtactaccctgtacgattactgttcgctttcatcagtataacgtttagctttataagccgggtgcatcaagttctgtacggagaaaatatcgtccagctcggcttccgttaacaggccgcgctccagcacaacttcacgtacgctcttaccggtttcagcacagattttaccgacgatgtcgccgttgtggtggccgatgaacgggttgaggtaagtgacgataccgatggagttataaacgtacccttcgcacacttctttattcgcggtaatgccgttaacgcatttttccagcaggttgtagcacgcgttgctcagaatgtggatggattcgaacatcgcctgaccgataaccggctccataacgttcaactgcaactgaccggcttccgccgccatcgtaacggtggtgtcgttaccgatgactttaaagcatacctggtttacgacttccggtacaaccgggttcactttggctggcatgatggaagagcccgcctgcagttccggcaggttgatctcgttcaggccggcacgaggaccagaagagagcaagcgcaggtcgttacagattttggacatcttcactgccagacgtttcagcgcgctgtgaaccataacatacgcgccacagtcagatgtcgcctcaatcagatcttcagccggaacacaggcgaaaccagtgacttcagccagttttttcaccgccagcggagagtattctttcggcgtgttcagaccagtaccgattgccgttgcgccaaggttgacttccagcagcagctcagcagtacgctcgatgcttttcacttcttctttcagcaggatgctgaacgcacggaattcttgaccaagcgtcatcggtacggcgtcctgcaactgggtacgacccattttcaggatgtcctggaattcaaccgctttacgttcgaaaccttcacgcaactggttgatggcatcgatcagtttgacgatagaggcgtaaaccgctacacggaagcctgtcggataggcgtcgttagtggattgacatttattcacgtggtcgttcgggttcaggtactgatattcacctttctgatgacccatcagttccagcccgatgttggccagcacttcgttggtattcatgttgacggaagtgcccgcgccgccctggtagacatctaccgggaactggtccatgcacttaccgttgttaaggacttcatcacatgcggcaatgatggcattcgccacactcttaggaatggtttgcagctctttgttggccagcgccgccgctttttttaccataaccatgccacgcacaaattcagggatgtcgctgattttgttattgctaatgtagaagttttcaatcgctctcagagtgtgaacaccatagtaggcttcagctggaacttccctggtacccaacagatcttcttcgatacgaatgttgtttgacatgtgaaccttctttttcaagctgccaatgatttttactttaaaacacacaggatatatgtgatttcgaatgttttctgaccgacgattatcccctccatcggcctgataaacgagatcatatgctggttcagaattcctaccgtaatctggatcacttaaagtgtgggaatttaccccttatttattattttgtgaaataggtcaccgctttagtattactacctaaaataggtgtacaaaccacttgaaattttgctacgcaccaccatatcgaatcgatgcgaatcgcaaccccattcaaatggtcgtcgcagacggccatgacttacaggagagtcctttgcgctggataccctttttagctgtctttctctatgtttacattgagatttctatctttatccaggtcgcccatgtgcttggcgtcctgatgacgttaatcctggtgatttttacgtctgttatcggtatgtcgctggtacgtaaccagggttttaaaaactttttgctgatgcaacaaaaaatggcggccggtgagagcccggcggcagaaatgattaagagtgtatcgctgatcatcgctggcttactgctcctgttgccgggatttttcaccgattttctcggccttctccttttgttaccgccagtgcaaaaacatttgacgctgaagttgctgccgcatttacgtttttcccggatgccgggcggcgggtttagcgcgggtactggcggtggcgaaacatttgacggcgagtatcagcgtaaagatgacgatcgcgatcgtattgaacataaagacgatcgtcgggattaaaggtagagatgctggccggataagtcgcgtgaggcgttatccggccaacagatacgtcttacgccatgcgttttcgcttcggtaaaaacagccataatgctgccagcatgataatggcatataagcttttccaccccagcattaccagcaataacaggcacagtagacaacccgtcaccgccagtgcatagcagcgccctttcaatagtcgacagcccgccagcatacaaagcagatagagcataataaaaataccgttagcatagacgatcagcgcattgaggttaatcttcagggcgtagacgaccagggaactcacgcaacaacaggccagaataacgtttaacgcgtgcaagggaaggcgcccgggagagagttgagccagatagtgatcgggctgatattgcatttgcgtccatatcagacgcgcaaaactctgagcatacacattcaggctggcaaagcaggtgagataaccaataatgcaggctatccacaacgcctggataccgaagagatgaacaataataagcggtagcgatgctgttgccgctatcttgtcgctatagacgccaaaatgcagcaccacggcggtacaggtccaataaatggagccggccagcatcaggccaatgatcaatgcgcgcggaaaatcacgttcaggatttttaaattcagacgacaaatgcgtaaacgcctcaattcccacaaatccccagaacatgatcgccagggcggtacacagccgggaaaaggtgatttcgtttgcggctgggaaggtgatatccgcaggtttaatcgcgcctttccacagaatggcggcaataagcgcgataattaatccagcgataatggcttgcaggttggcgctggagctggcgccgcgcgatcccataaaccatagcaaacctagagtacccagctccccaaataagagctgttcgctttgccagccaaacagcgcctggccgaaacccaccgcaatatgcaaggctgcgggaaaactaacaggaatgactgataaaaacagccaactgatcacccgttgcagacgcgggccaaatgccatcccgacaaaatgcgctacgccgccagcgtgtggaaaatggcgccccagcacagcaaagacaatcgcaatagggaaaatcaaaataatgagcagcggccatgcccaaaggctgatgtcgcctgccgccagcgcagccagctccggaagcgcaaaaacgccagtccctaataatgatgtggttaacaagataacgccctgaaccaacccaagctctttttttagttcattcatcagctcattatccggcggcattgtaacgtcaggtgacgacaggcatttttaagcgtatcacacacgccttttcttatagcaggatgttctaaaccttgggtaaacgtgagataagtagcgtttttaccgcttttttcgctcagaagaattttttttcatctccccccttgaaggggcaaaaccccatccccatctctctggtcaccagccgggaaaccgtttacgggccggcgtcacccataactgataatgactttctcaaaggagagctatcaatgagtattcgtccgttacatgatcgtgtgatcgtcaaacgtaaagaagttgagtccaaatctgctggcggcatcgtactgaccggttccgcagcgggtaaatcaactcgtggcgaaatcatcgctgtcggtaagggtcgcatcctggacaacggtactgtacagccgctggacgtgaaagttggcgacatcgttatttttaacgatggctacggtgtgaaatctgaaaagatcgacaatgaagaagtgttgatcatgtctgaaagcgacattctggcaattgttgaagcgtaatccgcgaacgacactgaacatacgaatttaagggaaagagaaaatggcagctaaagacgtaaaattcggtaacgacgctcgtgtgaaaatgctgcgcggcgtaaacgtactggcagatgcagtgaaagtaaccctgggtccgaaaggccgtaacgtggttctggataaatctttcggtgcgccgactatcactaaagatggtgtttccgtagcgcgtgaaatcgaactggaagacaagtttgaaaacatgggcgcgcagatggtgaaagaagttgcctctaaagcgaacgacgctgcaggcgacggtaccaccaccgcgaccgtactggcgcagtccatcattaccgaaggcctgaaagccgttgctgcgggcatgaacccgatggacctgaaacgtggtatcgacaaagcggttgctgctgcggttgaagagctgaaggcgctgtccgtaccgtgctccgactctaaagcgattgctcaggtaggtactatctccgctaactccgacgaaaccgtaggtaaactgatcgcggaagcgatggataaagtcggtaaagaaggcgtcatcaccgttgaagacggtaccggtctgcaggatgaactggacgtggttgaaggtatgcagtttgaccgcggctacctgtctccttacttcatcaacaagccggaaactggcgcagtagagctggaaagcccgttcatcctgctggctgataagaaaatctccaacatccgcgaaatgctgccggttctggaagccgttgcaaaagcaggcaaaccgctgctgatcatcgctgaagatgttgaaggcgaagcgctggctaccctggttgttaacaccatgcgtggcatcgtgaaagtggctgctgttaaggcaccgggcttcggcgatcgtcgtaaggcgatgctgcaggatatcgctaccctgaccggcggtaccgtaatctctgaagagatcggtatggagctggaaaaagcaaccctggaagacctgggtcaggcgaaacgcgttgtgatcaacaaagacaccaccaccatcattgatggcgtgggtgaagaagctgccatccagggccgtgttgctcagattcgtcagcagattgaagaagcgacctccgactacgatcgtgaaaaactgcaggagcgcgtagcgaaactggcaggcggcgttgcggttatcaaagttggcgctgcgaccgaagttgaaatgaaagagaagaaagcccgcgttgaagatgccctgcacgcgacccgtgctgcggtagaagaaggcgtggttgctggtggtggcgttgcgctgatccgcgttgcttctaaaattgctgacctgaaaggccagaacgaagaccagaacgtgggtatcaaagttgcgctgcgcgcaatggaagctccgctgcgtcagatcgtgctgaactgcggcgaagagccgtctgttgtcgctaacaccgttaaaggcggcgacggtaactacggttacaacgcagcaactgaagaatacggcaacatgatcgatatgggtatcctggacccaaccaaagttacccgttctgcgctgcagtacgcggcttctgtggctggtctgatgatcactaccgagtgcatggtgaccgacctgccgaaaagcgatgctcctgatttaggcgctgctggtggcatgggtggtatgggtggtatgggcggcatgatgtaattgcccacaccctgcatccttcaggctgcagatgcgttggctaaccccagtcacttacttgagtaagtgactggggattaacaaactggccgccttcctgcaaccagaatgatttggatgtttatctcccagaattgagaaacccccgggcagaaatgaccgggggtttttcttttagtcatctttttagtataagattcagatacggacaaaacgtccagctcattgattatggggaataacatgcacgtgaaatatttagcagggatcgttggcgccgcgctgctgatggcgggttgtagctccagcaacgaactcaccgctgccggccaaaatgtacgctttgtcgaagataagccaggcgcggaatgccagctaattggtacggcaaccggtaaacagagtaactggttttcaggccagcacggcgaagagggtggctcaatgcgtggcgcagcgaacgatctgcgtaatcaggcagccgcgatgggtggaaacgtgctgtatggcgtaagtagtccgtcacagggcatgttgtccagttttgtcccgacggccagcgagatgaacggccaggtttataaatgtccgaattgatatgtctggatcgtaacgccctctgaaagattcagagggcgatatggttagcgttttccctgcgatgatgccatgcgtagattatgcaacgcgcgcatgcattgatcttgcgtcagacgcgctgctttaccggttccaagcgttctgacaaaaaccttacacggttttccttccagctttttaagacgcgggctgaaattcagcaagcggcgtgatattgcttcagcttctttagagcctgactgactacgggtcttaatgatggtgccgcaatcatgcgattgtcctgcctcatccgtataacgataaacgagcgctaaataatggttatacagattatgtttccagtcaggctggttataggtatcgaattcgatattaccgttttccaggcagtcagcatcgtataatggtaaaaagtccagcattgaagaaatacgcaatgcgagctcacgcatttcggcattattaatggcgtgaataatagccatcaccagaacttcaacctgccactcaccgacctgtaaatcaagatggctaccattgtgcagctttaacgtaaaagttaatactttttctgtattatcgctcaacgctaaagattcaacacgctgattaacatcggcgttttccagctcttcacggagtattgccggaatattctcatgcattttaagcacatgactgcttttggctttctggcgtttttcctgctcttgttccggaagcgagtgttgtaaataaagccggtgttcaaggccgatcaacaagtctcgcagcgcgagtacaggaaagaaaagcagtgtttctttatttctcagtgacttcaccttaagcgccagcgcgataaacttatcattgtgacgaataacgccggtatttagtcccttaatcgttaaggccatgtcaattctccacaaatataaaataattaaatgttttactgcaatgtatttgatatataaattgtttatgccgtcctataaaaaggagaaccagtataattcgaaaatgcagtacacgctaagcgagtcctaaaacggactttattgaaaagagaggaccggaaaggtgtatttaacgaaggttagtttatcctcgccagagggtgaggagaatcgcgggggaatctcctcgtaatattgcgcgctaatatttttcgtcgtccctgacgcgcccgcgaggattagcactgccgaagctgtaaatccagcggtgttttgctcggttcgccgccgatttcacgcgccagtcttggcaccatatagccggataccagcgtgagcagttcgcgcatgatttgccgggcttcgtcatcggtgaccataaaatgcgcggcgccctgcactttatccagcacatgcaggtaatagggcatcacgccagcgtcaaatagcgcgttgctcagattcgccagcgttcgcgcgttatcattcacgccacgcagcaggacactctggttgagaagcgtgacgcccacgtggcgcagtttcttcatcgccaggcagaacgcctcgtccacttcattagcgtggttgatatggttcaccaacaaaatttgcagacgtgactggtcaaagcgggcgaccagttcgtcagtaatgcgtgccgggatgacgataggcaaccgactgtggatgcgtagccgcttgacgtgcttaatggcttccagttgcgtgagcagccagtccagctcatgatctttcgccatcagcggatcgccgccggaaaagatgatctcatccagttccgggtgtgcggcgatatactccagcgcgactgtccagttgcgcttattgccttgattctccgcatacgggaagtgacgacggaaacagtagcggcaatttaccgcacatccgccttttaccagcaatagcgcccggttttggtatttatgcaataatcctggcaccacgctgtgttgctcttccagcgggtcggtggagaaaccgggggcgacaataaattcatcccgggacgtcagtacttgacgtaaaagaggatcgtcagggttgcccttctccatgcgcgcaataaaagcgcgcggcacgcggagggcaaacaagcgcctggcgtcctgtcctgcccggaggttttcatcagcttcaatctgtaaaagatgcagcagttcgtcgggattggtcacaacatcggcaagttgcgctaaccaatcttctcgcaatggggtatttagggttacaatatgcgccattttgtggcttagctaccagttaacaatttcagagggccttatggcgacttactatagcaacgattttcgttccggtcttaaaatcatgttggatggcgaaccttatgcggttgaatccagtgaattcgtgaaaccgggtaaaggccaggcgtttgcccgcgttaagctgcgccgtctgctgaccggcacgcgcgttgagaaaaccttcaaatcgaccgattccgctgaaggcgcggatgtagtcgatatgaacctgacttacctgtacaacgacggtgagttctggcatttcatgaacaacgaaaccttcgagcagctgtctgcagatgccaaggctatcggcgacaacgcaaaatggctgttggatcaggcggaatgcatcgtaaccctgtggaacggtcagcctatctctgtcactccgccgaactttgttgaactggaaattgttgataccgacccaggtctgaagggcgataccgcaggtactggcggcaaaccagccacgctgtctactggcgcagtggttaaagttccgctgttcgtgcagattggcgaagtgatcaaagtcgatacccgttccggcgaatacgtatcccgcgtaaaataatttacgttatcgggaaaaatggtgcagcgtatgctgcgccatcctttttttcgcgcctcaatgatgaaacgctttatcagccttgtcgcgctggttcttcttaccagcacattattaacggcatgtaataccgcccgcggcttcggcgaagatattcagcatcttggccacgccatctcccgcgcagccagctaatcgcttctcgtcttcctaaaattagtcgatcgcccgtcattttctgggatgttgtctattattaagttgctatacacaaacaacattggctagaaaaggaagacattatggttaaaaagacaattgcagcgatcttttctgttttggtactttccactgtattaactgcttgtaataccacgcgcggcgtgggcgaggacatctcggacggtggtagtgcgatctctggcgctgcaaccagagctcagcagtaatcatcaacggtacggcatggcgtcgtaccgttaatcgattttctccggaagcataagaaagggagaataccgattatccatatgaagtttcatacggatattacgcttataggtgtaaaccgttttcccgtgaatgccaagcgcatacgcaatctctttattgctggtgccttccgtccacatcgcgagcactttttcctcctgcggagagagcaatggcgtggcgctttccggcgcttcctgcagtggatgagtatgtagcgctcctttaattcgttgtgcaagctcatgtaaaggcgtgtgtttagataacaccgcatgactggcatattgcggtctgtacggcatattccctgactgtaataataccaacggcgtcatcctgcaggcggcaaaaaatgcattgataggctgttcgggtaaggcatcgttgagaaaaccatataaatcagcgataaccaggtggggcttccattgcagaatatgttctttcgccagtataaggttattcatcccggataccagcagtgaagaactgagcacatcagtgtgattaagccaggcctccatgcccgtacgggtaaagtggcatcggtctatcactaaaattttcaacatagttttttgcacccggaagtagataaagcactttctttcccagaaggcgttccatcatagagaactcctgtgggcgctaaatgcgaaaactacgcggcttaaaagggccaattcccgcctttagacggaaaaaaataaaaaggttgaaattcattttctctcaggcaagaatggcttttcatccgtatacgttacaggacgacctgtaaacgctattctcaccggggacggccccattaattatctggagcctgctatgtcctggagcattctattaatcgctggtttacttgaagtggtatgggctgtcggcctgaagtatacccacggtttttctcgtctgacccccagtattatcaccattacggccatggttatcagtatggcgttactttcctgggcaatgaaaacgctgcctgttggaacggcgtacgccatctggaccggcatcggcgccgttggggcggcaatcaccggtatccttctgctgggcgagtctgcctcaccggcgcgtttgctcagtcttggcttgatcgtcgcgggtatcattgggctaaaactcagtgcgcattaattcgtcgctgacattgctacgaacctgattgttttacccaaattaatttattgacgtcaaacccctcccgggtcgcgacggccagcatttgctgttttatttcctcagaaagcgttggcgtgcgagagagtatccacagatagtcgcgatccgggccgcacaccagcgcatgacggtattcccggtcaagcgcaatcacgttatagccgccgtagaacgggccgaaaaaagagaccttgagcgcggcgcggtttggactaccggtaaaatacgctttgccttctgttttttgccacattccccgatccgggttatagcctttattgatgacattaatcccgccatcgtcacgcagactataggtggccgtgacttgttccagtccacgttcaaatcgatgatcgaggcgtgcgatctcataccaggtgccgaggtaacgtttggcatcaaagttatttaccacggtaacgcctttaggcggagtaggcgaactacaggcgacaaccagaaatgcagccgtaactgcagcaacgacgggcagaatgcgcataaaattttccttccagtgtttttttctaagtgtagaacctggcgggaaaatgagaggcaggaaaagaaaaaacgccctcttatcgggtagataagagggcgtcgtggcaacttagagagtgataacgccaattgccgtcacaacggtcaggattgccgccagaccgtaaaagacccatttgcccgcgggcacgtggattttcaggtcatgcatcgcgtggtgcatacggtgtaggccacaccatagcggcagcacgatcatcaggaacagaaaaacgcgaccaataaagctttgggcgaacgtcagtacgcgctcaaaactcagggcatcgcccggaaatagccccagcggcagcatgatgccaaccagtagcacgatcaccggcgcgatgatcgcgccccacataccgcctgcgccaaacagtccccagaatacgggttcatcagaacgttttgggtttggattaatcatccgggactccttaccagaacagggcaacatacagaatgactacggtgactaccgcagtgaccacccaaagccctttgatgattggctctggccccattttttcgtcttttacaatgatattggccgccttcggcgccagttcaaaccaggttttggtgtgcagcagcgcggccgccagggtgatcaggtttaagatcactaccaccgggttttgtaaaaagccgacgaatcccatccaggattccgcgccgtgtttgagcgcaaacagaccgaaaatcagttcaatactgaaccagactgccggcaccgctgtgccttcgcgcagcatataaaagcgataaaacggcagttttttccaccaggtggacgtcatcggccgcacatagggtttgcgtttagtcgtcatgttgcactccttagcgtggtttcagggtggcgataagaaagtctttcgagctttccactttaccctgctgaatggccgcagccggatcgacatgttttggacagacttcggagcagtagcccacgaaagtacaggtccatacgccgttcggactgttcaactgcgccatacgctccttcttaccgtgatcgcggctatcttcgttatagcgatgcgccagcgtaatcgcagccggtccgataaactcaggattcagaccgaactgcgggcacgcggcgtagcacagaccacagttgatgcaaccggagaactggtgatacttcgccatttgcgccggggtctggacattcggcccctgatctggcgtgcgagagttgccaataatgtacggtttgatcgcttccaggctttcgataaagtgcgtcatatcgacaaccagatcgcgctcaatcgggaagttcgccagcgcttccaccttcataccgttggtgtaatcgcgcaggaaggttttacacgccagtttagggacgttgttgaccatcatgccgcaagagccgcagatcgccatacggcaggaccagcggtagctcaggtctggcgacaggttatctttgatgtagcccaacgcgtccagtagcgatgttgtttcatcataaggaacttcatagaaagcactgtgcggcgcggtatcggtttccgggttatagcgcaccacctcaactttcaggtttttcatctcagccattcgccttctccttcttatcggctgcttccgcttcaccgccgtaaacacgtttggctggcggcagggtggtgattttcacgtcgctgtattccagacgggtcgtgccatcagcatcgcggaaggcgagggtgtgcttgaggaagttcacatcgtcgcgctcggtacagccttcatccagacgctgatgcgcgccgcgggactctttacgcgccagcgcagagtgcgccatacattccgccacgttcagaccatgacccagttcgatggtatacagcaggtcagtgttgaacacgctggaagtatcggagatacgtacgcgcttgaaacgttcctgaagctcggccagtttatcaacggttttctgcatcagttccggggtacggtaaataccgcaaccttcttccatagacagacccatctcatcgcggatcttcgaccagttttcgttgccttcctggttcaccagatttttcagacgctgttcaatatcggcaacctgggcgtcgagcgcggcgctatttgcggcgcctgccgtagcagcgcgttccattgcttgttcgccagccagacgaccaaacaccaccagttccgccagcgagttggaaccgaggcggttcgcgccatgcaggccaacagaggagcattcgccaacggcaaacagccctttgacacggctttcacagttctggtcggtttcaatgccgcccatggtgtagtgcgcggtcggacgtactggaatcggttctttaaccggatcgacgccgacataggctttcgccagttcgcaaatgaacggcagacgttcatgcagtttcttctcgccgagatgacgcagatcgaggtgaaccacatcgccgcgcggcgtggagatggtgttgcctttacgccattcgtgccagaaagcctgggatactttgtcgcgcggccccagttccatatatttgtttttcggctcgcccagcggcgtttcggggcccatgccgtagtcttgcaggtaacggtagccatttttattgaccagaataccgccttcgccgcggcaaccttcagtcatcaggataccggaacctggcaggccggtcgggtgatactgaacgaattccatatcacgcagcggaacgccgtggctcagcgccatgcccatcccgtcgccggtgacgatgccgccgttggtgttatagcggtatacgcggcctgcgccgcctgtcgccatgaccacggcgttggcgcggatttgcaccagcgtgccttccatcatgttcattgccaccaggccgcgcgcatggttgtcatcaaccagaatatccagcacgaaatgttcgtcaaagcgctggatttgtgggaactgcagggaagtctggaacagggtatgcagcatatggaagccggttttatccgcggcgaaccaggtacgctcgattttcataccaccgaagcgacgcacgttaacgctaccgtccggacggcggctccacgggcagccccattgctccagctgcgtcatctcagtgggacaatggtggacaaagtaatccacgacatcctgctcacacagccagtctccgcctgctaccgtatcgtgaaaatggtagtcaaagctgtcatgatcctgggcgacagcggctgaacccccttcggcagcgacggtgtggctgcgcatcgggtacacttttgagatcagtgcgattttagcattgggattcgcctgtgcggcagcaattgcagcacgtaatcccgcgccaccggcgcctataatggcaagatcggcttgaaaggtttgcacgacattcctccagattattgtaatttcaccctcgcgcagccagataaagcctctgggttctgcgaagtatgaatgcgtttccactgctcctttatgggtacaacagtatagtctcagggatgtgagggaaatttgacgtgttcgatttttttagcgtatcagagggatgaattatcattgattttgattaatttaattactaaaccatctgaaatcactttttttaccctccagaaggcgcccgatacgccagtgcaaaatttgtttcgcccgcgcgttgcgagtagacttcgtgaccttgtcttaaactggagaaagaatcatgagcgaaacggcaacctggcagccgagcgcgtccatccccaatttattaaaacgtgcggcgattatggcggaaatccgtcgtttctttgccgatcgtggagtgcttgaggttgagacgccctgcatgagtcaggcgacggtcacagacattcatctgttcccgttcgaaacgcgtttcgtcggacctggccattcccaggggatcaacctctatttaatgaccagtccggaataccatatgaaacgcctgctggcggcagggtgcggcccggttttccagctatgccgcagtttccgtaatgaagagatgggacgacatcataatccggaattcactatgctggagtggtatcgcccgcattacgatatgtaccgcctgatgaatgaagtggatgatttgcttcagcaagtgctggattgtcaacctgcggaaagtctctcctatcaacaggcgtttcagcgccatctggagattgacccgttatcagcagataaaacgcaactgcgtgaggcggcggcaaagcttgatttaagcaatatcgccgatacggaagaagaccgtgatacgttgctgcaactgttgttcacgatgggggttgagccgcatataggtaaagaaaagccgacctttatttatcactttccggcaagtcaggcatcgctggcacaaatcagtaccgaggatcatcgcgtcgccgagcgctttgaggtgtactacaaaggtattgagctggcgaatggtttccacgaactgacggacgcacgtgagcaacaacagcgctttgaacaggacaatcgtaagcgcgccgctcgcggtctgccgcagcagccgattgaccaaaatctactggatgcgctggccgccggtctaccggattgttccggcgtggcgctgggtgttgatcgtctggtgatgctggcgctgggagcagaaagcctggcggacgtgattgcttttacggtcgatcgggcgtaaatctgaaattcactctttcgcgagataaaatggcgcaataagcgccattttgtagcatattttttcaattatcctctgtttgccacaacataaggctggaactttgatgccatttaggtatcaatcctgtgttgatttttttatcgctgaccttcgtaaaaaagaaggcggcgtcaatcggtgagcggcgtctggcaaacgcgctcgagcgtaagggatggttgaatgacccacacgataaaaaagatgagccttattgggcttatcctgatgatttttacttctgtttttggttttgcgaatagcccgtcggcgttttatttaatggggtatagcgcaatcccgtggtatatattttctgccttgctgttttttattccattcgccttaatgatggctgaaatgggttccgcttatcgcaaagaagagggcgggatctattcgtggatgaataatagcgtggggccacgttacgcgtttattggcacgtttatgtggttttcatcgtatgtcatatggatggtaagtacggcggcaaaaatttgggtaccgttttctacttttgtttttggcgccgatatgacgcagcactggcgtattgcagggcttgagcctacgcaggttgtcgggctgctcgccgtcggctggatgattctggtgacgtgtgtcgccgccagagggatcaataaaattgcgcgaattacggcggtcggaggtattgccgtaatgtgtcttaatttagttttattgttagtgagtgtcgctattttgttattaaatggtgggcattttgcacaagaaattaattttacctcgtcaccgaatccgggttatcactccggcctggcaatgttgtcatttgtggtatttgctatttttgcgtacggcggtattgaggctgtcggcggactggtggataaaaccgagaaaccggaaaagaattttgcgaaaggtattgttttcgcggctattgtgatttcaattggttattctttggcgatctttttatggggcgtcagcactaactggcaacagatattaagtaatagcgccgttaacttagggaatattacctacattttgatgtcgagtttaggcacgacattaggtaacgcgttaaacctttctccggacgcagcgatgacggtgggcgtctggtttgcgcgtatcaccggcctttctatgtttctggcttataccggcgcgttttttacgttgagctattcaccgctgaaagccattattcaggggacgccaaaagcgttgtggcccgcgccgatgacgacactgaacgctaacggtatgccggcgaccgctatgtggctacagtgcgtgctggtgagtctgtttattttgctggtctcttttggcggtgacaccgcatcggcgttttataacaaactcacgctgatggcgaacgtctcaatgaccttgccatacctgttccttgcgctggcatttcccttctttaaagcgcgtcaggatctggagcggccatttgttctctttaaaaccaaagcctctaccctggtcgcgacgggtgttgtggtgctggtggtgacgtttgccaacgtctttaccatcatccagccggtgattgaagctggggattgggacagcgccttgtggatgatcggtgggccgatcttcttctcgctgctggcgatggcgatttatcagaattacagcagccgcatgagcgctgatccggagtgggcggcggagtaatctttgtccggatagcgttagctcatcggctttatgaaaaggatatttataatgagtccgaaaatgtttgcattgtgcgctatctggcttttactggctatcccactcatcgctgtattttcagtcctggataaagagtggatgattggcgagagtgggataaacaacatttgtgatgtgatgagaactgtcgaaaatgatgattccagaggttttggcgcgatgatgacgctgcccctgtttttcccgtttttttacgttactgtgtataagaaaatacgtagttggtttttgtactgtgtcgcgttggtgatatttgcttactggtcctggcaattcttcctgcgctatcagttttgtgtgtgatctatgctaaaagacctgataagcctatgtcatcgagtcttttagcgtcatccggcgccattgcgtttacaaactccccgccgggcggctggttttacccgctgacgttaacgttctccccgtttgtttaccgccgaggctctccagacgcatctggaacggcgggaacggcatatcaataccgtgctcgcggaagcccgccagaatcaattggtggatctcatggcgtaatggcatacggtgtcccatttccgcggcatagatacgcagttcgaaaatctgaataccctgctggagatccaccagaaagatttcaggcggcgggttatcaagcaccaaagaacagcgctgcgccgccgtcagcagaatttgcgtcacctcttcgctattggcatccgctggcgccgggatggttaacaccacgcgcgtaacggagtcagacagcgaccagttgataaactgttcggtgataaaggctttattcggcacgataatctctttacgatcccagtcactgatagtggtggcgcgggtattgattttggtcacgctgccggtgagatcgcgaatggtcaccgtatcgccgatacgaatcggcttttcaaacaaaataatcaggccggagataaagttagcgaaaatttcttgcaggccaaaaccaagcccaacgccgagcgcggccaccagccattgtagcttcgaccactcaatgccgatcatcgagaaaccgaccagcccgccaatcagcattaacagatatttggtgatggtcgtgatggcgtaaccggtaccaggcgttaaatcgagatgctgtaataacgccagttccagcagcgcaggcagattacgcaccaactgcgtggtgatgataaagaccagaatcgcaatgagcaccgcccccagagtaatcggctccaggctttccacgccttgcaccgtagaggtgacatcccacagcgaaatattctccaggaagccgaatgccgagtggatttccgaccacagtacaattaccgatagcagggcgataagcatcagaattgagcggaccagacgcagcgactgagcgctaatagcgtcaagatcgatttcactttcatcgatgtcgaccgcgccttccaggctggaggagtgcgccggttcttcttcgccgcgcgcgcgctgcgccagcatttccgcccgacgatgtttggcgcggtcaaaagccagtcggcgtcgttggatcagcatccagcggcgaatgacgtgatagatgaccagcaacaggaaccagatggcgaccgaggtttccagtctcgccagtagcgcctgcgccgtggccagataacccaccgccgccgccagaatcgcgataagcggcgcgcccatcagcatattccacagcaggctgttgaccatgttgtcgccgttgccttctttatcaagatagagcgggatgcccgcttttttcagactcagcgtgaccagcgccagcgcgccgcatatcaggatgaagcaaaggcggcccaacgagccggaaaactcccgatcgttaagattatcaaacatgatcactgccatgatgagcggcacgatcagcccaatgctcatcaggtagtagcgcatcgctttcgctacccggtttcgcggccagccgaaatgcgccacaaacagaccattaggacgggcaaaagcggcgcaaatcatgactacccacaacagcggtactgtcgccgtcacgccatcaccgatggcgacggccagcggatacggccaggcttcctgtagaccatagccgagcgtcgcccacaagaccggcagcggcgaggcgaccagaatcgaccagaacaccgttcgcagcgtcagcgagaagtgatcctgggtgactttcccgacgcgcgaggccgagcgctcaaggaaccggttgaagtgttgacgtgaatagaggctaaacccgaccagcgccagcgcgccgaataacggcagtagcgtctctttgctggtcagcatcatgatgctggctttacctaactgattaaacgtatctaatgagataagccggcgtaaatcctgaaccaaatcaacaggccaggagagcgatagcgggctaacgtcagcggtccagaacagataacggtgggtcgcttcattaacctctttaagcgcatcctccagttggctgttggagactttcagtttggtcagctccaggatcagcgtatcgccgccctgtaacaaagagttgagcagctcgcgctgagtgcgaagctgggcgtcaagaatctggttttgctcggcggtcagcggctgtccattggcctgacgtatttgccgtagctgcggctgtttattgagtaattcttcatagcgcatacggtgaacgcgtagctgcgccatttccgtatcaagctgctgcggtttaggcatctctggcagacgggcgacctgcgcgcgcagcgcttcgccaagcatgttggacacgccaagccattgcgactgctcccgcagcgtattgagcgcctgacgcacctgtaacgtttggctggtggcctgtcgctgctgcgaggcgaccagatccatccgctgcgcttgttgattaagcgcctgtgacagctcgcggttgactttaaattgttcgacgataccttccggcaaaccggcgctgttttccgccagcagctcagtgctttccagcgcgcgttccgcttcacgttgacgcaggctgttgagctgattgcgcagcgcctgaagatacgcatccaattgctgactctgtttttccgccagctcggaacgcagacgagccagttcctgccggttgttggcggacagttgcgccaactccagttcgtcgactaacgcttttagtttggcggactccgcctgcatactgagactttgcgcctggctaagcgcggcacttccgcctgcggcgccgagtcgtcgctcaatctcattaagctggcggcgggcgtcgttttgctgttggggaagctggctgagcgagtcggcgatctccctgacgcgctcctgctcctgttgcgcctcgcgggttttatccagtagctggctgctaacctgcaagatctcctgatttaacgcttcggtggacatctctggcggtacgctgcgaggttcatcgcgcagattattcaactgggcgcgcaaggtggcggatagcttagggaaattatcaataacgtgttgatattgtttcgcgcgctcaagcgagccttttcgctcttcaagcgcgtttaacgcagtctggagcgcctcaacggcttccggctgagcgggcttcgccgcttttgcctgctccagttcctgcgtgatttgtttggcgtcgggggccgttgcggcaaacgcccccgtgctgaggcaccaggccatcagaaaagcgataatcaggcgcacgtcagcattctctcttgattaggtgtcgtcttttttattgtcaaccagcgggctggcgtcgtgttcggctttaatttcttctgccggcagcggagcaggttctacctccggcgcgacgaatgtttcggtcgacgtcgccagcggttggccaattttggtaacggacaggcttgccagcgacgcgatcagattcactttccccggcgcaaataagttgataaccgtggaacccagtttaaagcgccccatctcctggcctttcaacaaggcgacagacccttcatgttcgccttctggccaggtccagcgcttgatgatgccttcgcgcggcggggtaatggtccccgcccagacggtttcgatactgccgacaatagttgcgccgaccagaatctgcgccatagggccgaactcggtatcaaacagacagataacgcgctcgttgcgggcaaacaggttggggacgttttgcgcggtcagatggttaacggagaacagatcgcccggtacgtagatcatttcgcgcaggatgccgttgcatggcatatgcacgcgatggtagtcgcgaggggagaggtaagtggtcacaaacgtgccgttgcggaacttatccgccatcaggtagttacccgccagcaacgcttcaaggctgtaattatggcctttggcctgcaaaattttatcttcttcgatacgacccaactggcttatcacgccgtcggcaggcataaccaggatgttaggatcggtattgagcggacgcacgtcatcacgcagcggacgaacaaagaaatcattgaacgtacgatagctggcggtatccggtttttgcgcctcggtcatatcgactttgtaatactttacgaagagatcgataaccagttttgtcagccatcctgctcgtttgcttgcgccccagcccgccaggcgagtgagccatagtttcggcagaatgtattgtagcgaaagtttaaatgagtttaacaaggtagcctccaggccattgttgttcctgaaccggcagttataccggtatcctgaaaaaaggggacgattctaacgacgcctagcgtatctgtcagtcgtccgtatcagaaaagtttttacgcgtttttacctgcgccatactttcaagaattcggtgataattttcgaaacgggtttccgcaatagcgccgttctctaccgcctcgcgaatggcgcagcctggatcggcgtcatgcttgcagtcccggtatttacaatgtcccaaatagtcatgaaattcgacaaagccctgggtgatttgttccggctccagatgccataagccgaactcgcgcacgccgggggaatcaatgacatcgccgccatgcgggaaatgatacagacgagcagcggtagtggtatgttgacccagaccggagacattcgacacatcgttcgtcagaatctcgttctgtaagccgagcagagcgtttagcagactggattttccgacgccggactgcccggcaaaaatactgatgcgaccggttaacgcttcttccagcggtttcagaccatcctgcgtatggctggagaccatcagcacgcgatagccgatattgcggtagatatccatctgctcattaacgaagtccataccttcgtcgtccagcagatcaattttattgagtacgataagcggctcaacctgtagggtttcacagccgaccagatagcgatcgatgatattcagcgacagctccggcaaaatcgcggagacgataacgatttggtcaatgttggcggcaataggcttcacgccgtcgtagaagtccgggcgcgtcaataccgaggtgcgctcatgcaccgcttcaacgatgccttttacgttgacgccctctgcggcggctttgcccggacgccagacgacgcgatcgcccgtcaccagcgaacggatagtgcggcggatattgcaacggtgaacctcgccgtcagcagactccacatcggcatgcataccaagacggctaatgacgataccttctgcaggctcgccaaacaggttgtcatcgtagtcggctttctccgcggacgtttttaaacgacgctggtgattggcgttcacacggcgctgctggcctttggagagtttatttttgctcaatcgtactggctcctggtcgcccatagtgggcaaaacatctatgatacacgcaattgtagatgaatatagtcacagtgaatgtgacctctgaagggtggaaaatagcatgagtgccgatgaaaacaacctgatttggatcgatctggagatgacaggtctggaccccgagcgcgatcgcattattgagatagccacgctggtaacggatgccagcctgaatattctggcggaagggccgacgattgcggtacatcaatccgatgcgcaactggcgttaatggatgactggaacgtgcgcacccataccggcagcggcctggtagatcgcgttaaggcaagtacgatgggcgaacgagacgctgaactggcgacgattgaatttctgaaaacgtgggtgcctgcgggtaagtcgccgatttgcggtaacagcatcggtcaggatcgtcgttttctgtttaaatatatgccggaactggaggcctacttccactatcgctatctggatgtcagtacgctcaaggaactggcgcgccgctggaagccggagattctggccggctttaccaagcagggcacgcaccaagcgatggatgatattcgcgagtcggtggcggagctggcttactaccgcgagcatttcattaagctgtgaggcgtaacatgccggatggcaacgccagagcgtctcatccggcagctctcccgccactgaattactgcgtaaaccatttctcctgcatctgcgcatattccggcgacgctttcaccttgtcgagcgcggcattaatttcttgcaatagcgcgtcgttgcctttgcgtaccgcaatgcctaacccttttccgtagtagtcaggatcgctggcgcgttcatccatgatggcgtaatccggattgttttttagccacttaccaatcgcggcgacatcgccaaacacgccctcaagacggttatttttcagatcggtaaaagcgtttagatagctgtcataggcgacaggcgtgatggcttgttgtttatcctgcaaatagcgctgatgcgttgtaccgttttccagaccgacttttttgcctttcagatcggcaaaagtgtgataagcccctttacgcgtgacgactaccgccgatagaccttcgtaatagggttggctaaaggagacctgctgctcacgtttgggcgtcatatccataccggcgatcaccgcatcaaactttttgaagcgtaggctggggatcagactatcaaagctctggttagtgaatgagcactccgcttgcatctctttgcagaccgcgttggcgacatcaatatcgaaaccaacaattttattatcggcatcgacaaactcatagggcgcataggtggcggaggtgccaaaatgtaatgttctggcggaaacggaagcggcgtgaacggagaggctggctaacagcatgacaataagttttttttcatcttgatccctgatatcaattggatgttgtggtcaccgtgctattctttttttggcgcagggtgctattctgattctgtgcctttaggcgtggcgtgaaaagttttttgttgcatagcgcacgctttgctcgttttttgtcttgtttggtgatttaatcagcattcaaacaaaaatcgcgaaaaaatgcgttcaggggcttgcagctaaatggatttctcgtataatgcgcctcccgtaacgacgcagaaatgcgaattacgacagcaacaaatttgcgggaatagctcagttggtagagcacgaccttgccaaggtcggggtcgcgagttcgagtctcgtttcccgctccaaaatttgaaagtacttgttaagtacagaccaccaatcgcaggatttcgagttgcgacaaggcggcaactgaatgagtcctcaggagcttactgaagtaagtgactcaggcgagtgaaggcagccaacgcagtagcggttcgaaagacgaagattatgcgggaatagctcagttggtagagcacgaccttgccaaggtcggggtcgcgagttcgagtctcgtttcccgctccaaaatttgaaagtgcttgttaagcacagaccaccaatcgcaggatttcgaattgcgacaaggcggcaactgaatgagttctcaggagcttactgaagtaagtgactgaggcgagtgaaggcagccaacgcagtagcggttcgaaagacgaagattatgcgggaatagctcagttggtagagcacgaccttgccaaggtcggggtcgcgagttcgagtctcgtttcccgctccaattcttatctacagtaaaattgtccacaacgaatatcgcgttggggcacgttttgttccgctttcgtcagatccttgtaaacagacttatccacagggcggcccattactcctggaatgtaaaaaattatacctgacgcgtagaatttttataatttactgaaaaatatagaaaaaataagatttcaaaacgttagcgttattgtctgttccttttttccctcttgaatcgcaatgtgtttttatttttatacacagcctgtgaataattcaggcatcgcgcaccagccctttttcaatcaccctgaccagacgctgttttttcggtagctgcacttcaatgatgcaggcgttccgcttttcaatttgttgcgcaatcgcccattcgatatgctcatcaagaagtggatgttcacccttgcggctttccagcgccgtaatgacggcattactccacggcgcattccccagcgcgacggcaacattgcgcagccagcgtaaatgaccaatgcgccgaatcgcagtaccttcagtgactttcagaaactgcgcttcgctccagctaaacaactcaaccaaatctgggttatgcagcgccttgcgtgggctaaaatctgcttcgtcggtcaactgagagtaacgattccacggacagataagctggcagtcatcgcagccgtaaatacggttgcctatcagtgggcgaaatgcttccggaatagcgccttccagctcaatggtgagataagaaatacagcgccgcgcgtccaccgtatacggttcgacaatcgccccggtcgggcaaatggtcatacaggcgacgcatttgccgcaaccttcctcgaccggctggtcgaccggcagcggtaaatcaatcagcaattcccccaggaaaaagaatgagcccgcctcccgattaaggataagtgagtgcttacccgtccagccaagtccggctttttccgctaatgggcgttcaagaataggcgcagagtcgacaaacggtctaaaattcagcgaaccgcagtactgctggatctgctcgcccagttttttaagacggctgcgtaacagcttgtgataatcacgccccagcgcatatcggctaacgtagcccagcgtgggatccttcaacgtactggcaaacgcggcgttggcgggcagatagttcatgcgcacgctgatgacacgtagcgtaccgggtaagagttcatgaggccgggcgcgcatcataccgtggcgcgccatccatgccatctcgccgtggtattgtttgtccagccacgcctgcagcgcaggttcggatgcgcgcagatcggtatcagtaataccgacctgctgaaagcccagctccagcccccactgcttaatattttgcgctaactgattgagatcgaggggctttgacatgatggaccataacatgaagaaaaaccctgtaagtataccacactccatttggctcgccgatgacatcaaacggctggaacgcgatgcggcggatgccttcggactcacactctatgaattgatgctgcgcgctggcgacgcggcatttcgggtagcccgtgacagttatcctgacacccgacactggctggtgttgtgtggtcatggcaacaacggcggcgatggttacgtcgtggcgcgactagcgcaagcggcgggcattagcgtaacgttgctggcgcaggagagcgacaaaccgttgcctgaagaagcggcgcaggcgcgcgatgcctggctgaatgctggcggcattatccatgctgccgatattatctggccggaagcgacggatctgattatcgacgcgctgcttggcaccggcatagcccaggcgccgcgcgacccggtagccggtctgattgaacaggcgaacgctcatcctgcgccggttgtcgccgtcgatatcccgtcaggtctgctggcgcaaacgggcgccacgcctggcgcggtgataagcgccgcgcatacggtcacgtttatcgccctgaaaccaggcctgctgaccggcaaagcgcgtgacgttaccggcatattgcattatgacgcgttggggctggaaggctggctggcgagccagacgccgccgctccggcgttttgacgcgacgcagttggggcaatggttaacgccgcgtcgaccgacctcgcataagggcgatcatggtcgtctggcgatcatcggcggcgaccagggaacagcgggcgcaattcggatggctggcgaggcggcgctgcgtacgggggctgggttggtcagagtactgactcgcggtgaaaacatcgcgccgttgctgacagcccgcccggaactgatggtacatgaactcacgcctcagtcgctggaagagagcctgacctgggctgacgttgtggtgatcggcccggggcttgggcagcaggaatggggcaaaaaagccttacagaaagtagaaaacgtccgtaaacctatgctgtgggatgcggatgcgttgaacctactggcaatcaatcctgataaacgtcacaatcgcgtgattacgccgcatccgggagaggcagcccgcctgttaggatgttctgtggcagaaattgaaagtgatcgcttactttcagcacagcgtctggtaaaacggtatggaggcgtggtcgtgttaaaaggcgcaggaacgattattgccgctgaacaccaccctctggctatcattgacgctggtaatgcggggatggcgagcggcgggatgggcgatgtcctgtccggcatcatcggcgcattgctcggacagaagtttaccccgtatgatgcggcatgtgtgggatgtgtggctcacggcgcggcggcggacttactggcagcgcgttatggcgctcgcggcatgttggcgaccgatctttttactacgctgcggcgtattgttaaccctgatgtgattgacgtaaaccatgatgaatcgagtaattccgctacctgacgaacaggcgacgctagacctggggcaacgggtagccaacgcctgtgatggcgcgaccgttatttatctgtatggcgatttaggtgccggtaaaacgacgtttagccggggatttttacaggcgttaggccataacggtaatgtaaaaagccccacctatacgctggtagagccttatgcgcttgataacatgatggtatatcacttcgacttataccgtcttgcggacccggaggagctggagtttatgggcattcgcgattatttcgccaacgacgccatttgtctggtggagtggccgcaacaaggtaaaggcgttctccccgacccggacgtcgaaatccatattgattaccaggcgcaggggcgtgaggctcgcgtaagcgcggtatcctcatcgggtcattcgttactggcgcgtttagccgattagctataaaggtggcgggatgatttatcgcatcaaaaatgccgtaatagcagtcttaatcctgctgtgcgcgcaggcgggcgccgccagtctctctgatattcaggtgtccaacggcgagcagcaggcgcgcattacgctgagttttatcggcgagccggaatatgcttactcacaggacggtaaacggaccgtggcgctggatatcaggcagaccggcgtgattcaggggctgccgcttcagtttagcggtaacaatctggtaaaaacgatccgtgctggaacgccgaaagatgcgcaatctttacggttgcttgtcgatctgacggaaaatggtaaaaccgaggcggtgaagcggcaaaacggcggcaactatacggtcattttcaccattaatgccgatgttccgccgccaccgccgcctgtcgtcgcgaaacgggttgaaagcgcgcctcgcccgacggagccggcccgtaatccgtttaaatcttctgatgatcgcctgaccggcgtaaccagcagcaataccgttacgcggcctgcggcgcgcgcgtcggcaggcgctggcgataaagtggtgattgctattgatgccggacatggaggccaggaccccggcgcgataggcccgggcggtacgcgcgagaaaaatgtcaccatcgccatcgcgcgtaagttacgcacattgctgaataacgatccgatgtttaaaggcgtgctgacgcgtgacggcgactattttatttcggtgatggggcggtctgacgtggcgcgtaagcaaaacgccaacttccttgtctctattcatgcggatgccgcgccaaatcgcgacgccaccggcgcctccgtctgggtattgtccaatcgtcgcgcgaacagcgaaatggcaaactggcttgagcagcatgagaagcaatccgaactgttaggcggcgctggcgatgtgctggcgaacagtcagtcagacccttacctgagccaggcggtactggatttgcaattcggtcattcgcagcgggtagggtatgatgtggcgacgaacgtactaagccaactggacggcgtggggtcgctgcataaacgtcgcccggaacacgcgagcctgggcgtgctgcgttcgccggatatcccgtccattttggtggagacgggctttatcagtaatcacggcgaagagcgattgctggcgagcgaccgctatcagcagcagattgctgacgctatataccgagggttgcgtaagtactttgcagcgcatccgatccagtctgcgccgcagggcggcccaggccagacggccagtaccaaccagcctggcaccataaccgccgcgaattaaggagatttcatgccgattcaggttctgccgccgcagcttgcgaaccaaatcgccgctggcgaagtggtggaacgccctgcgtcggttgttaaagagctggtagagaatagtctggatgcaggcgccacccgcgttgatatcgacattgagcgtggcggcgcgaagcttattcgtattcgcgacaatggctgcggcattaaaaaagaggagctggcgctggcgctggcccgtcatgccaccagtaaaatcgcctcgcttgacgatctggaagcgattatcagtctgggatttcgcggcgaagcgctggcgagtatcagttcggtctcgcgtttgacgctaacgtcgcgcacggcggagcaggcggaagcctggcaggcgtatgcggaagggcgtgacatggacgtgacggtaaaacccgccgcgcacccggtcggcaccaccctggaagttctggatctcttttacaatacgcccgcccggcgcaaattcatgcgtaccgaaaaaacggaatttaatcatatcgatgagatcatccgtcgtattgcattggcccgttttgacgtcacgcttaacctgtcgcacaacggcaaattggtacggcagtatcgcgctgtcgcaaaggacgggcaaaaagagcgccggttaggcgccatctgcggcacgccgtttctcgaacaggcactggcgatcgagtggcagcatggcgatctgaccctgcgcggctgggtcgccgatccgaatcacaccaccacggcgttaacggagatccagtactgctatgtgaatggccgcatgatgcgcgaccgcttgatcaaccatgccattcgccaggcctgtgaagataagctgggcgcggaccaacagcctgcgtttgtgttgtatctggagattgacccgcatcaggtggatgtcaatgttcatcccgccaagcacgaagtgcgttttcatcaatcccggctggtgcacgacttcatctatcaaggggtgctgagcgtcctgcaacagcagacggaaacgacgctgccgctggaggagattgcgccagcgccgcggcatgtcccggaaaaccgtatcgccgccgggcgcaaccattttgctgtacccgccgagccaactgcggcgcgcgagcccgcgacaccgcgttattccggcggcgcatcgggcggcaacggcgggcgtcagtccgcgggtggttggccgcacgctcagccaggttatcagaagcagcagggcgaggtttatcgcgcgcttttacagacgccggcgacgagccccgcgccggagccggttgcgcctgcgcttgacggacatagccagagttttggtcgcgtactgacgatagtcggcggtgactgtgcgttgctggaacacgcggggactatccagctcttgtcgctgccggttgcggagcgttggctgcgtcaggcgcagcttacaccgggtcaaagtccggtttgcgcgcagccgttgctgattccgctgcgtttaaaagtgagcgccgatgaaaaagccgcgctgcaaaaagcccaatctttgttgggagaattgggtattgaatttcagtcagatgcgcagcatgtgaccattcgggcagtgcctttacccttacgacaacaaaatttacaaatcttgattcctgaactgataggctacctggcgcaacagaccacatttgcaacggtcaatattgcacaatggatagcgcgtaatgtgcagagcgaacatccgcagtggtcgatggcgcaggccatatcgctgctggcggatgttgagcggctatgtccgcagctggtaaaagcgccgccgggtggcctgttacaacctgttgatttacattcggcgatgaacgccctgaagcatgaatgatgtaagcaaagcgagcctgcctaaggcgatatttttgatggggccgacggcctccggcaaaacggcgctggcgatagaactgcgtaaagttttgccagtagagttgataagcgttgattccgccctcatttatcggggaatggatattggcacggctaagccgaatgccgatgagctgaaagcggcgccgcatcgactgctggatatacgcgacccgtcgcaggcgtattcggcggcggattttcgccgcgacgcgttagcgcaaatggcggagatcacctctgcggggcgtatcccgctgttagtgggcggtaccatgctgtattttaaggcattgctggaagggttatcgccgctgccttcagcagatccggaagtcagatcccggatagagcagcaagcagcggagcttggatgggaggcgttgcatcagcaacttcaggagatagatccggttgccgccgcgcgaattcatccaaatgatccgcaaagactttcccgggcactggaagtttttttcatttcgggtaaaactttaacggagctaacgcaaacgtcaggagacgcgctaccgtaccaggtgcatcagttcgctatcgccccggcgagccgtgaactgctccatcagcgcattgaactgcgttttcatcagatgttggcttcaggttttgaagcagaagtccgggcgctttttgcccgaggagatttgcatacggacttgccttccatccgttgtgtgggataccgccagatgtggtcatacattgagggcgaaatctcatatgatgaaatggtttatagaggtgtttgcgccacgagacagttggcgaagcgccagatgacctggttgcgcggttgggaaggggtgcgctggcttgacagtgagaatcccgatcgggcgcgaaaagaagtattacaggttgttggtgctatcgcagactgaatgtgtacaattgagacgtatcgtgcgcaatttttcagaatcgaaaggttcaaagtacaaataagcatataaggaaaagagaatggctaaggggcaatctttacaagatccgttcctgaacgcattgcgtcgggaacgtgttccagtttctatttatttggtgaatggtattaagctgcaaggtcaaatcgagtcctttgatcagttcgtgatcctgttgaagaacacggtcagccagatggtttataagcacgcgatttctactgttgtcccgtctcgcccggtttctcatcacagcaacaatgccggtggcggcgccagcaataactaccatcacggtagcaacgcgcagggttctactgcgcaacaggacagcgaagagactgaataagttcacgcgctgtttatccatgtcgggggcgtcggataatcgcccccgctggttattaagagggtttacgcttgtttgaccgttatgatgccggtgagcaggcggtactggtacacatctatttttcgcaagacaaagatatggaagacctccaggagtttgaatctctggtctcttccgccggtgtcgaagcaatgcaggtgattaccggtagccgtaaagcaccgcacccgaagtactttgtaggtgaaggtaaggcagttgaaattgcggaagccgtgaaagcgactggcgcagcggtcgtattgtttgatcatgcattgagtccagcccaggagcgaaacctggagcgtttgtgcgagtgccgggttatcgatcgcaccggtcttatcttagatatttttgcccaacgtgcgcgaacccatgaaggtaagttgcaggttgagctggcgcagctacgccatctggctacgcgtctggtgcgtggctggacccaccttgaacgtcagaaaggcgggattggtttgcgcggtccgggtgaaacccagctcgaaaccgaccgtcgtttactgcgtaatcgcattgtgcagattcagtcgcgcctggagaaagttgagaagcaacgtgagcaggggcggcagtcgcgcatcaaggccgacgttccgacggtatcgctggtgggctataccaacgccggaaaatccaccctttttaatcagatcactgaagcgcgggtctatgcggcagatcagctatttgcgacgctggacccgaccttacgtcgtattgatgtagcggatgtcggtgaaaccgttctggcggatacggtaggctttatccgccatttaccgcacgatctggtggctgcctttaaagctaccctgcaggagacgcgtcaggcgacgctgctgctgcatgtggtcgatgcggcggatgttcgtgtgcaggaaaacatcgaggcggtaaacaccgttcttgaagagattgacgctcacgaaatccccaccttaatggtgatgaacaaaatcgatatgctggacgactttgaaccgcgtatcgacagagatgaagagaataaacccatccgcgtttggctttcagcgcaaagcggcgtggggataccacagctttttcaggctttgacggagcgtctttccggcgaggtggcgcagcatacgctgcgtttgccgccgcaggaagggcgtctgagaagccggttttatcagcttcaggcaatagaaaaagagtggatggaggaagacggtagcgtcagtctgcaggtacgaatgccgattgtcgactggcgtcgcctctgtaaacaagaaccggcgttgatcgaatacgtgatctagacgcgaagtcattcaggtcgtattgaagcggtagctgagagaatttcaggagctcacaacgaagtgacctggggtaaaaaagccgccactcaagacgcagcctgaaagatgatgtctgtaacggcggttcgtctgaagcatggagtaatttcgccttatcctctgaggtcgaaagacaacggggatcaccgcataacaaatatggagcacaaacatggcgtggaatcagcccggtaataacggacaggaccgcgacccgtggggaagcagcaaacctggcagcaactctgggggaaatggaaacaaaggtggccgcgatcagggacctcccgatctggatgatatcttccgtaagctgagtaaaaaactcggtggttttgggggcggtaaaggcaccggttccggcggcggtagctcatcgcaaggcccgcgtccgcaactgggaggccgtattgtcgccatcgcggcggcggcagtagtcattatctgggcggccagcggtttttataccattaaagaagccgagcgcggcgttgtgacgcgttttggtaaattcagccatctggtagagccaggtctgaactggaagccgacatttattgacgacgttacgccggtgaacgtcgaagcggtgcgcgaactggcggcgtcaggcgtgatgctgacgtctgatgaaaacgtcgtgcgcgttgaaatgaacgtgcaataccgcgtcaccgatccgcagaaatatctgtttagcgtgaccagcccggacgatagcctgcgtcaggccaccgacagcgcgctgcgtggcgtcattggtaaatacacgatggatcgcatcctgaccgaaggtcgtaccgttattcgtagcgatacccaacgcgagctggaagagactatcaaaccgtacaacatggggattaccctgctggacgtgaacttccaggctgcgcgcccgccggaagaggtgaaagccgcctttgacgacgcgattgccgcacgtgaaaacgagcagcagtacattcgtgaagcggaagcgtataccaacgaagttcagccgcgcgccaacggtcaggcgcagcgtattctggaagaggcacgcgcctataaaacccagactatcctggaagcgcagggtgaagtcgcccggtttgcgaagattttgccggaatataaagccgcgccgcagattacacgcgagcgtctgtatattgaaacgatggaaaaagtgctgagccatacccgtaaagtactggttaacgacaagagcggtaatttaatggtgctgccgttagatcagatgctgaaaggcgggaatgcgccggcggcaaagagcgacaatagcgctagcaacctgctgcgcctgccgccgtccacaaagtctaacgccagcggagcaagcaacacgtcgtcctcaaatcagggcgatattatggaccaacgccgcgcgaatgcgcagcgtaacgactaccagcgtcagggggaataacgatgcgtaagtcagttattgcgattatcatcatcgtgctggtagtgctctacatgtccgtctttgtggtcaaagagggcgagcgcggcattacgctgcgttttggtaaagttctgcgtgacgatgagaacaaaccgctggtttacgcgccgggtctgcactttaagatcccgtttattgaatcagtgaaaatgcttgatgcgcgtatccagacgatggataaccaggccgatcgctttgtgactaaagagaagaaagacctgattgtcgactcctacatcaaatggcgtatcagcgactttagccgttactatctggcgaccggcggcggcgatatttcgcaagccgaagtgctgttaaaacgtaaattctcggaccgtttgcgttctgagattggtcgcctggacgtaaaagacatcgtgaccgattctcgtggtcgtctgactctggaagtgcgcgacgcgctgaactccggttcagccggtaccgatgatgaagtagcgaccccggcggcggatgacgcgattgccgaagcggcggaacgcgtcacggcggaaaccaaaggtaaagtaccggtcatcaacccgaacagtatggcggcgttgggtatcgaagtggtcgatgtgcgtattaagcagatcaacctgccgaccgaggtttctgaggcgatttacaaccgtatgcgcgccgagcgtgaagcggtcgcgcgtcgtcatcgttcacaaggtcaggaagaagcggaaaaactgcgtgcggctgctgactatgaggtgacgaaaactctggcggaagccgagcgtcaggggcgaatcatgcgtggtgaaggtgatgctgaagccgcgaagctgtttgccgacgcgttcagtcaggaccctgatttctacgcgttcattcgtagtctgcgcgcttacgagaagagcttcgaaggtaatcaggacgtgatggtattgagcccggacagcgatttcttccgctacatgaagacaccgagttcgacgacacgctaaaatagcgtcagcggttttagaccagcaaaaccaccgcatccaaaggatgccggtggttttcttttataagggcgataaatgaattcaacaatctggttggcgcttgctctggtattagtcctcgaagggctgggaccgatgctgtatcccggcgcatggaaaaaaatggtttcggcactggcgcaactgccggaaaatgttttacgacgttttggcggcggacttgtggttgcgggagttgtggtctactacatgttgaggaaaacgattggctgaacaaaaagtggtcggatttgccgcagattgagtgcaaaaagtgctgtatatctgaaaaagcgatggtagaatccatttttaagcaaacggtgattttgaaaaatgggtaacaacgtcgtcgtactgggcacccaatggggtgacgaaggtaaaggaaagatcgtcgatcttctgactgaacgggctaaatatgttgtacgctaccagggcggtcacaacgcaggccatactctcgtaatcaacggtgaaaaaaccgttctccatcttattccatcaggtattcttcgcgagaatgtaaccagcatcatcggtaacggtgttgtgctgtctccgagcgcgctgatgaaagagatgaaagaactggaagaccgtggcatccccgttcgtgagcgtctgctgctgtctgaagcctgtccgctgatccttgattatcacgttgcgctggataacgcgcgtgagaaagcgcgtggcgcgaaagcgatcggcaccaccggtcgtggaatcgggcctgcttatgaagataaagtggcacgtcgcggtctgcgtgttggtgaccttttcgacaaagaaaccttcgctgaaaaactgaaagaagtgatggaatatcacaacttccagttggttaactactacaaagttgaagcggttgattaccagaaagttctggatgatacgatggctgttgccgacatcctgacttctatggttgttgacgtttcggacctgctcgaccaggcgcgtcagcgtggcgatttcgtcatgtttgaaggtgcgcagggtaccctgctggatatcgaccacggtacttatccgtacgtaacttcttctaacaccacagcaggtggcgtggcgaccggttccggcctgggcccgcgttatgttgattacgttctgggtatcctcaaagcttactccactcgtgtaggtgcaggtccgttcccgaccgaactgtttgatgaaaccggcgagttcctctgcaagcagggtaacgaatacggcgccactaccggccgtcgtcgtcgtaccggctggctggacaccgttgccgttcgtcgtgcggtacagctgaactccctgtctggcttctgcctgaccaaactggacgtgctggatggcctgaaagaggtgaaactctgcgtggcttaccgtatgccggatggtcgcgaagtgactaccactccgctggcagctgacgactggaaaggtgtagagccgatttacgaaaccatgccgggctggtctgaatccaccttcggcgtgaaagatcgtagcggcctgccgcaggcggcgctgaactacatcaaacgtatcgaagaactgaccggcgtgccgattgatattatttctaccggccccgatcgtactgagacgatgattctgcgcgacccgttcgacgcgtaaatctggtacgcctggcagatattttgcttgccgggctaacagtgtgatacattgctgtgtcgggtaagccattacgctatccgacacagtgctaaatcctcgcttttttccttccccgaactgaaataaattagcgacacagcttgtggctggtttatcatcaatacagataagttatatcccgttttcccttttcctgaggttgatgtgcagttaacgagtttcaccgattacggcttacgtgcgctaatctatatggcgtcgttaccagatggacgaatgaccagcatttctgaggtgacagaagtctacggcgtgtcccgtaatcatatggtcaaaattatcaatcagcttagccgggcgggctttgtcactgccgttcggggaaaaaatggcggtatccgcctgggtaaaccggctaatactatttgtattggcgatgtggtgcgtgagctggaacccttatcactggtcaactgtagcagcgaattttgccacatcacccctgcctgtcgtctgaaacaggcgctttctaaggccgtgcagagttttctcaaggagctggataactacacgcttgccgatttggttgaagagaatcaaccgctttataaattattactggtggagtgaagtaaacttcattagagatgacaatggaggaacctcaatgtcacaagatcctttccaggaacgcgaagcagaaaaatacgcgaatcctatcccgagccgggaatttatcctcgaacatttaacgaaacgtgaaaaaccggccagtcgcgaagaactggccgtagaactgaatattgaaggcgaagagcagcttgaagccttgcgtcgccgcctgcgcgcgatggaacgcgacggacaactggtctttacccgccgccagtgctatgcgctgccggaacgcctcgacctgctgaaaggcaccgtgatcggtcatcgtgacggttacggtttcttacgtgtcgaaggccgcaaagacgatctgtatctttccagcgagcagatgaaaacctgtattcatggcgatcaggtgctggcgcagccgctgggcgccgatcgtaaaggtcgccgcgaagcgcgtatcgtccgtgtactggtaccgaaaaccagtcagatagtcgggcgttatttcaccgatgcgggcgtcggctttgtggtgccggacgacagccgtctcagcttcgacattcttatcccgccagaagacgtcatgggcgcgcggatggggttcgtggtcgtggttgaactgacccaacgtccaactcgccgtactaaagcggtagggaaaatcgtcgaagtgctgggcgacaatatgggcaccggtatggcggttgatatggcgctgcgtacccatgaaataccttacatctggccgcaggcggtagagcagcaggtcgccgggctgaaagaagaggtgccggaagaggcgaaagtcggtcgtgtcgatctgcgcgatttgccgctggtcactattgatggcgaagatgcccgtgactttgacgacgcggtttactgtgagaaaaaacgcggcggcggctggcgtttgtgggtcgctattgctgacgtgagctattatgtacggccgccaacgccgctggatcgcgaggcgcgcaatcgcggcacgtcggtttacttcccgtcacaggttgtcccaatgttgccggaggtgctctccaacggtctgtgttcgctaaacccgcaggttgacaggctgtgtatggtctgtgaaatgaccatctcggcgaaaggtcggctgaccggctacaaattctatgaagcggtgatgagctcccatgcgcgtctgacctataccaaagtctggcatatgctgcagggcgatcaggatctgcgtgaacaatatgcgccgctggtgaagcatattgaagagctgcacaacctctacaaagtgctggataaagcgcgtgaagagcgcggggggatctcgtttgagagcgaagaggcgaagtttatctttaacgccgaacgtcgcattgagcgtatcgaacagacccagcgtaatgacgcgcataagcttatcgaagagtgcatgatcatggcgaatatctcggcggcgcgctttgtcgaaaaagctaaagagccggcgctattccgtattcatgataagcccaccaccgaagcgatcacctcattccgctccgtactggcggagctggggttggagctgccgggcggaaataaaccggaaccgcgcgattatgccgaactgcttgaatcgattgccgaccggccggacgccgaaatgctgcaaactatgctgctgcgttcaatgaagcaggcgatttacgatccggaaaaccgcgggcactttggcctggcgttgcagtcttatgcgcactttacctcgccgattcgccgctatccggatctttctttgcaccgcgccattaagtacctgctggctaaagagcaagggaacaagggcaacaccacagaaacgggcggttatcactactcgatggaagagatgttgcagctcggccagcactgttcgatggcggaacgccgcgctgatgaagcgacgcgtgatgtctccgactggctgaaatgtgactttatgctggatcaggtaggcaacgtctttaagggcgtgattgccagcgtcaccggtttcggcttctttgtccgtcttgatgaactgtttatcgatgggctggtacacgtttcctcactggataacgattactatcgcttcgatcaggtagggcaacgtctgattggcgagtccggtgggcagacatatcgcctgggcgaccgggtcgaggtacgcgtcgaagcggtgaatatggacgaacggaaaattgactttagcttgatttccagcgagcgcgcaccgcgtaacgtcggcaaaacggcgcgtgaaaaagcgaaaaaaggtgaaagtaaaaacgccggtaaacgtcgtcaggtaggtaaaaaagttaacttcgagcctgatagcgccttccgcggcgagaaaaaagcgaagccgaaagcagcgaagaaagacgcgagaaaagcaaaaaagccatcggctaaaacgcagaaaatagccgcagcgaccaaagcgaagcgtgcggcgaagaaaaaagcggcagagtgagcaataccctcttcaaacagaagagggtgaattatctgtaggccgggcaagcgtagcgcccccggcaaaacgtaaacaacgagtacattaatgagcgaaatgatttacggcatccacgcagtgcaggccctgctggagcgcgcccctgaacgttttcaggaagtctttattttaaaaggccgtgaagataaacgtctgttgccgctgattcacgcccttgagtcccagggcgttgttatccagctggcaaaccgccaatatctcgacgagaaaagcgacggtgccgtgcatcagggtattatcgctcgcgtgaaaccaggccggcagtatcaggaaaacgatctgccggatctgatcgcattacacgaacgcccctttttgttgatcctcgatggcgtcaccgatccgcataatcttggcgcctgtctgcgcagcgccgatgccgctggcgtacatgcggtaatcgtgccgaaagaccgctccgcgcaacttaacgcgacggcgaagaaagtcgcctgcggcgcagcggaaagcgtgccgttgatccgcgtcaccaacctggcgcgcacgatgcgcatgttgcaggaagagaatatctggattgtcggaacggcgggcgaggctgaccatacgctgtatcagagcaaaatgcctggccgcatggcgctggtcatgggcgcagaaggtgaaggtatgcgtcgtctgacccgtgagcactgcgatgagctgatcagcattcctatggccggtagcgtgtcgtcgctgaatgtctctgtggcgaccgggatttgtctgtttgaagccgttcgccagcgaacctgacgctaatagtattttttaagaaaataaccatccataatcggatggtttttttttatctttggctggtaatataaaaagcaaaacctaccctgtaactccctttatttataaaaaagagatagagataataatatggcatggactccacggacgctggcggatgcgttaaacaacatcgccgaattagatattgatatagaaaataatgagtcttcattaataataaaaatgaatgattatggcgatttaccactggcggttttatttacctcgcaacaaatagttatcgagacttatatctgtccggtaaatacgattagagataccgcggaatttaatcttttcttactgagaaatcagaaggttttaccgctgtcttcggtcggtattactcaggtaaaacaggaggaatattatgtcgcttttggcgcgctgtcgttaaattcgtcgcttgccgacgtgacgctggaaatcaccacgcttgtagaaaatgcgttggatatcgctgaaataacacaagtctattcacaggaataatacaggcggcttacatgggaattttaaaaagtttgttcacattaggtaaatcattcgttgctcaggcagaagacgccattgatgaagcgcagggtgtacgtatgctggagcagcatattcgcgacgcaaaagccgagctggataaagcgggtaaatccagagtggatttattggcgcgggtgaagttaagccatgacaagctgaatgatttacgtgagcgtaaagccagccttgaaacacgggcgttggcggcaatgagtaagaatgtcgacgccgctttactcaacgaagtggcggaagaaatagcccgtctggaaaatgccattcttgccgaagaacaggtgctgactaatctggaagcctctcgtgatgcggtggagaaggccgtaacggcgacaggccagcggattgcgcagtttgagcagcaacttgaagtggttaaggcgacagaagccatgcagcgcgcgcagcaggcggtgacgacctcgaccgtcggagccgcgtcgaatgtgtctacggcggcggagtcgcttaaacgtttacaaacgcgtcaggctgaacgccaggcccggctggatgccgccgcgcagctggaaaaagtcgccgatggacgcgacctggacgaaaaactggcgcaggccggtattggcgcaaccaataaaagcaatgctcaggatgtgttggcgcgtttacagcgtcaacaaggcgaataatgctctttacgtggattgtcaaaacctgccagcgtcatttgtccagactgacctggcccgctttgctgggcctgtttatcgggcagtatctgctttgctatctggtgctgcgcctgttgcgcgaaagcgcgttggtgagccagttaagcgattttatctattactgctcggtggtgggttccacattaggttttggcgatcttagcccgcagacggcgccaggacgtctgttcaccgcgctgtggcaaattccggttagcgtcgggttgttcggcgcgttaatgggaaaagtgattgcgcaggtgcagggaatgttagcgaaaggaataacgggcatgggcgattatcgccatttacaccatcatatgctggtgattggctggcggggtcatcaaaccgaaaagatgatctcattgctgctatatgacaagcggcgtgcctttgaacgggttctgctgtgcgaactggaagatattcagcatccgctgccgggtaataactgggtggattttatccgcatcagcaactttaacgatccgcaggaacaccagcgcatggggctggagcagtgccagagcgtgattattttcgctcgtaccgatgagcagaccttcacggcggcgctctcgctggcagactatgtacccgcgcagtgccatattgtggtttatctggaagacgagcgttatgccggattactggaaacccactgcccgcgcatggagatagtccgtaacctttccgctgaacaactttcccgttccattcaggacccaggatcatcgcaatctgtcgcttccattatgaatccgatgctgggcgataccggattcgcgctgcctgtcccggcttctgtcgcgcctatgcgatacggcgcgctaatgcgttatatgaagcttcatcatgacgcgacggtgctggggatcagtcactgcaagaatggtcgtggtatggaattgaatccggtgatttcaactgaagtcagaggcggtatgtggctacatctggtcggtaataatcgcattctggctgaagaggtcgcatggcaagagatagaggttcccctatgatgcaattttttcagcgtttgctcggtaaaacaagcgcgccagcgccgattcgcggaccattaggattacatcttaacgccggtttcacgctggatacgctggcatttcggctactggagtcgtcgttgctggtggcgctaccgggtgaaaaatacactgtcgcggcagcgagtcgtatagatttaggcggcggcagtcagatttttcgctactacacctctggcgatgagtttctacaaattaacaccactggcggcacggatgttgacgacattgatgacatcaaactctttgtatatgaggaaagtttcggtattaacgaggaacgtcactggcgttcagccattgcgccagcggcaatagggccgatgacgctcaactggcaagaacggcgctggcagcgcttttttaaccatgaagagccgggcaatattgaacctgtctacatgctggaaaaggttgaaaatcagcaggcagagaaatgggacgttcacaattttacgatgggcttccagcgccaggtgacggatgacgcctgggagtatcttctattgaacggggaagaatcatttaatgagcgcggtgagcctgaatgggtgttttcacgcgccctcggcgtggatatcccgctcacttcactgacggttattggttaagcacatacagggaaattatgcatatactggacgcattactggctttctgcgcctatttttttattggcgcggcaatggtcattgtatttctttttatttactcaaagataacgccgcataatgaatggcagctgataaaaaataacaatactgcggcatcgctggcctttagtggtacgttgctgggctatgtcatccccttatccagcgcggcgataaactcggtcagtatcccggactattttgcctggggcggcattgcgctggtgattcaactactgatttatggttgcgtaaggttatacatgcctacgctgagcgaaaaaattattcatcacaacgtggcggcggggctatttatgggaaccgcagcgctggctggcggtatttttaacgctgcctgtatgacatggtaacggaagatcatggcaaaaaaacgaaaatccagaagcacatccggcgtaggccattcggcaataagacgaatagccgaaccggtcaatccctttgagcggcaacgaaatcgctacacgccaaaatgcctgacgctggcgattatgggtggagcggccttttttctcctgaaagggtgcggtgatggcggcaatactgacaacgacggcgatgggacgttttacgccacggtgaacgactgtattgacgatggcaatagcgccagcgtttgcgctgacggctggaataatgcgaaaacagaattttacgctaatgtgcctaagcaattgacgcaggagcgctgtcagacgcagtttggcgattgctactttgatatcaccgagcggagctgggttccggtattaagcggctttttactcagccgcgcgattcgtcagaaccgtgatgaacaatacatctatagcagcggcggttcatcttacgtctcccgtcccgtctggcgcaccacatccggcgattatgcgtggcgcagcggcacagggaaaagcgataccgtgaccagccctggttatatcacacggaaagcgtccaccgtctcccgcggcggctatggccgttcttccagcgcccgcgggcactggggaggctaaccatgctacgacacaacgtaccgatacgccgggatctggataagatcgcctgcgatcacggttttgactttcatgttatcgataacgaaatttactgggatgaaagccgggcctaccgttttacattacggcaaattgaagaacagatcgaaaaaccgaccgcagagcttcatcagatgtgtctggagattgtcgagcgggccgtccgggatgagcagatcatgcagcagctggcgatcccgccattgtactgggatgtcatcgccgaaagttggcgcagccgcgatccttcgctttacgggcggatggatttcgtctggtgcggcaaagatccggttaaattgctggaatacaatgcggatacgccgacgtcgctctatgagtcctcctactttcaatggctatggctggaggatgctcgtcgtagcggcgccatcccgcgtgatgccgatcaatacaacgcgatacaggagcggctgatcgcccgcttcagcgagctgtacagtcgggaaccgctctacttttgctgttgtgaagataccgacgaagatcgcacgacggtgctgtaccttcaggattgcgcgcagcaggcgggccaggaaacgcgatttatctatattgaagaactgggacttggcgtaggcggtgtgctgaccgatctggacgataacgtgattcgccgcgcctttaagctctacccgctggaatggatgatgcgcgatgacaacggcccgctgttgcgaaaacgtcgtgagcaatggattgagccattgtggaaaagtattctgagtaacaaagggctgttgccgttattgtggcgctttttccctggccatccgaatcttctgccggcctggtttgagggcgaaaaatcgctcgcagcgccaggcgaaagcagcgtacggaagccgatttattcacgtgaaggcggcaacgtcacgattttcgacgagcggcaaaatgttatcgatcatgccgacggcgactacgctgacgagccgatgatttaccaggcgtttcagcctttgccgcgctttggcgatagctatacgctgattggcagttggatcattgacgatgaagcctccgggatggggattcgcgaggacaatacgctaattaccaaagacacttcccgtttcgtcccacattatattgccggttaatcatacttttgtgatcttgctccggcgtcaatggcgcagtcatgaccatacttgacttcagcgccattgaaggagggagacaccatgtcctggcaaacacataccgtctttaatcaacctgctccgctcaataacagtaacttattcctgtctgatggcgcgctgtgtgaagcggtttcccgggaaggcgcgggatgggatagcgatcttctcgccagcattggccaacaactgggaacggcggaatcactggaactggggcgtctggcgaacgcgcatcctcctgagttgctacgttacgatccccagggacagcgtttggatgacgttcgctttcatcccgcctggcacctgttgatgcaggggctttgcgctaatcgggtacataacctggcctgggaggaagaggcaagggcgggaagttttgtcgcccgggcggcgcgttttgtattacatgctcaggtagaagcgggaacactctgtcctgtcacgatgacctttgccgcgacaccgttgctattgcagatgcttcccaccactttccatgactggctggcgccgctgcgcagcgatcgctacgattcgcatttgctgccgggcgggcaaaaacggggcctgctcatcggcatgggaatgacggaaaagcagggcggatctgacgtactcagtaatacgacccacgcggagcggctggcggatgattcatatcggctggtgggacataaatggtttttctctgtgccgcaaagtgatgcgcacctcgtgttggcgcaggcaaaaggaggactatcctgtttctttgtgccgcgtttcctgccagacgggcaacggaactctgttcgtcttgaacgcctgaaagataaactcggtaatcgatctaatgccagcgccgaagtcgagtttcaggatgccgtcggctggcggctgggagaagagggcgaagggattcggcatatcttaaagatgggcggtatgacgcgtcttgattgcgcgctcgggagtcatggcttaatgcggcgtgcgttttcagtcgccatttaccatgctcatcagcgtcaggcttttggtaagccgctgatcgaacaaccgttgatgcgacaaaccttaagtcgtatggcgctatgcctggaggggcagacggcgcttttgtttcggctggcgcgcgcctgggagcaacgtcgcgaggcgaaagaggcattatgggcgcgattattcacgccagcggcgaaattcgccatctgtaagcagggaatcccttttgtggctgaggcgatggaggttctcggcgggatggggtattgcgaagagagcgaactcccgcgcctgtaccgtgaaatgccggtgaacagtatctgggaaggttccggcaatatcatgtgtctggatgtacttcgggtgctgacaaaacaacacggcgtctatgacgtattgagtgaagcttttgcggaagtcaaaggtcaggatcgccattacgaccgcgcggtacgtcagctacagcaacgtttacgcaaaccggacgaagcaatgggcagagagattacgcagcagcttttcttgctggggtgcggagcggaaatgctgcgtcatgcctcgccgccgctggcgcaagcgtggtgtcagatgatgctggatacacgcggcgaaatgccgctgtctgcccaggtacaaaatgatttactgttaagggcgaccgggggactgcggtaacgtttggcctgtagtacatgccatccggcgcgagccacgcggcatcaggcatagagtatcgcctgtacgcgccagttatccgactgttgttctttatacatttgaataattctgtaccaggacgcaccctgttcatcggctttcagggcgataatccgctccacatcctgtgggtttcctgcaacattactgaccgagatcaggccgatttcattcagacccgttacgcagtcagcactggcgaattcggcagactgtgccgtcgtactcaccagtccggcagaaagcagcagtgaggataaggcaagttcttgtttcatcgtcagctccttattacataccccgcatttaacaggacgctccatcacggtaaacctgtttgtttattgtgcacaggtaaacgcataggggcgcaaagcaatgtaaaactgactaaaaatcaatctactgttattgacgatacaaaatggcttgtgaataccactggccggttacaaccgtttcatcaaccattaagataacgtaataatcggctttcgcagcgacggctttcgctctgatttcatctattgcatcatccggggagccccgaaccagcgcgcttacggtccccatccgctgtagtccttgcgtttgatcgcgacggatttcctgcgggtgatcggcgataggcggcgcaggttgcggcgtaccctgcagcacgctacacgcgcttaataacagcgctgctatcaatgaagcaaaccgacgcataactctatctcgtttcctgataatcatagtgtaatgccttattgatttccctttagggggaatgttcccgaagtgttacctgtcacgcgattttcgaatgaaaacgttgcgaaagcgtaacccagttctcaaacattatgaattattgcgctatccataaacttgcgttaagtatttctccgtggcataccggataaaaaggagagaataatgatagcgattgaaacacgacaattagccggaggcgtcgtactacatgccttcccggaagggaaacgcgccgtgccgcttccctgtgtggtgttctatcatggcttcacctcctccagcctggtttatagttattttgccgttgccctggcacaggcaggattccgggtagtcatgccggatgcgccggagcatggcgctcgcttcggcggcgactcacagggacggatacaccgattctggcagattctgcaccaaaacatgcaggaatttacgacgttacgtgcggcgattcaggcggaaaactggctacttgacgggcggttggcggtgggcggcgcatccatgggcggtatgacggcgctgggcattatgacgcgtcaccgagaggtaaaatgcggggccagtttaatggggtcgggctattttaccgggctcgcccggacgcttttcccgccgttatccccgcagaacccggcgcagcaggcggaattcgacaatatcatcgcgccgctacgtgaatgggaagtcacacatcagttagagcgcctggccgacaggccgcttctgttgtggcatggtcaggaggatgacgtggtgcctgctatcgaaaccttccggctccagcaggcactcgccgcggcgaagctggataagcatgtgacctgtttatgggccgcaggcgtgcggcatcgcattacgccagaagcgttgtcggcgacggtagcgtttttccgacagcatctttaaacgcggagtatgcttacaccctgggcttcaagctgttgcaaaacctgcggattggcatttttgccggtaatcagcatagcgatctgatcggcgcggctgaacagcatccccgcgcgctcgccaattttactgctatcgaccagcgcgaccagtttcccgacgacgctgagcattttttgttccgccatggcggttagcatatcggtcttgtacaggccatccgcggttaagccctttccgctggtaaacatccagtggccagcatagagactgttttcacttccctgcgggctcagggtaatcgactggcttttattatactgaccacccatgataatcacgctgtcatgctcttgatcgatcagataattcgccagcggcagatagttggtaatgatctgtaccggtttcccgcacatttcacgccccagcaggaaagcggtggagccgcagttaatcactacgctttcacccgggtttaccagctgcgacgccgctttcgcgatgcgtactttttcatcgtggttttgcgcctggtgcagattcatcggcgtccagcggggccgctgttgggtaatggcctctgcgccgttgcgcacttttttaagtttcccgctttcgtcgagcttgttgatgtcgcggcgcgctgtcgccggggagatccccagacgctcaatcacgttttcgacggtaacaaagcccaactgtgccagcatatccagcagtatttgatgtctttgtgcttcagtcatgagctattccgatacaaattgatttgaaaagatgatatttgaaatagcctggaaatactaaagtaaatggaaaaaatgccgggtaatcccggcatgatatcgactcacaggaaggatttgaacggtagatcgggttcaatggtaaagcaatcgtcaaacccacgcggatagtggtattcgaaattgtctttatccagcggccaggtaaacttgccgccaacctgccagataaacggtttaaaaccatacttcaggcgatctttcttcatttcccatagcacgcggatctcttgcggatcggcctggaagttcgaccagatatcgtgatggaacgggatcaccactttggtattcagcgattccgccatgcgtaaaatatccgcgctggtcattttgtccgtaataccgcgcgggttttcaccgtaagaaccgagcgcgacatcaatttgatgttcgttgccgtgtttcgcgtagtagttggaatagtgagaatcgccgctgtgatagagattgccgcccggcgttttaaacagatagttaaccgcgcgtacatccatgccgtccggcagtacgccagcagctttctgatcggcaggcagggtgattaatgcagtgcggtcaaaggcatcaagcgcatgaatttcaatatctttcactttcacgacatcgcccggttttaccacgatgcagcgttctttcggcacgccccagccaacccacaaatccacgcaggtctgcgggccgataaacggaacatcatcggcgcaattctgcattacggcagccgcgacattgacgtcaatgtgatcgttatggtcgtgggtcgccagtacggcgtcaatctgacggatagcgaaaggatcgagaacaaacggcgtggtgcgcaggttaggctgtaattttttgacgccagccatacgctgcatctgatggccggttttcatcaacggattaccgtggctctgtttaccggtaccgcaccagaaatcgacgcatacgttagtgccgccttcagattttagccagataccggtacagcccagccaccacatagcgaacgtacccggcgcgacctgctcttgctcaatctcttcgttcagccagcttccccactccggaaacgtgctcagaatccatgattcacgcgtgatgctttgtactttactcatcgcatttaccttcatgtttgttcaaaatagttcaaaatgtgatttgttttgattaatcctgacactattttctcaagaaggcaatgggctattttttgacttttgggtagaggagaacgcagccagaagaaaatttaatcttttctggcgtcatggggatgtattcatctttatgattttacttattttaatgaagaaatgagttatttataagtaaaccatgtattaagtgtgctaattatttgcgcgctacgtcacatttaatcaaattcaatcttgttgtgattacttttgaaaattacagtggagggacattattctgagcgcctgtgactcagcaaccttgtctaccggagatcgttatggagatcctctacaacatctttaccattttttttaatcaggtaatgaccaatgccccgctattactgggtattgtgacctgcctgggctatatcctgctgcgtaaaagcgtcagcgtgatcatcaaagggacgatcaaaaccatcattggcttcatgctgctacaggccgggtccggcattctgaccagcacctttaaaccggtggtggcgaaaatgtctgaggtctacggcatcaacggcgcgatttccgatacctatgcttcgatgatggcaacgatcgaacggatgggtgatgcgtatagttgggtaggctacgcggtgttgctcgcgctggcgctgaatatttgttacgtcttgttgcgacgcattaccggtattcgcaccatcatgttgaccgggcacatcatgttccagcaggcggggctgattgcggtctctttctatatcttcggctattccatgtggaccaccattatctgcacggcgatactggtttccctgtactggggtattacctccaacatgatgtacaagccgactcaggaagtgaccgatggctgtggtttctccatcggtcaccagcagcagtttgcttcctggattgcctataaagtcgcgccgttcctgggcaaaaaagaggaaagcgttgaagacctcaaactgccgggctggctgaacattttccatgacaacatcgtctccacggcgattgtaatgaccatcttctttggtgccattctgctctcctttggtatcgataccgtacaggcgatggcgggtaaaacccactggacaatctatatcctgcaaaccggtttctcctttgcggtggcgatcttcatcatcacccagggcgtgcgtatgtttgtcgccgagctctctgaggcctttaacggtatctcccagcgtctgattccgggcgcagtactggcgattgactgcgccgctatttatagcttcgcgccgaacgcggtggtctggggctttatgtggggcaccatcggtcagctgattgcggttggcatcctggttgcctgcggctcctcgatcctgattattcctggctttatcccgatgttcttctctaacgccactatcggcgtgttcgctaaccacttcggcggctggcgtgcggcgctgaagatttgtctggtgatggggatgatcgaaatctttggttgcgtctgggcggtgaaactcacggggatgagcgcctggatgggtatggcggactggtcgattctggcaccgccgatgatgcagggcttcttctccctcggtatcgcctttatggccgtcatcattgtaattgcactggcttatatgttcttcgctggccgcgcactgcgcgcagaagaagatgcagaaaaacaactggcagaacagtctgcttaataaggagttttgattatgaccgtacgtattctggctgtgtgtggcaacggacagggcagttccatgatcatgaaaatgaaagtggaccagtttttaacccaatcaaacattgaccacacggtaaacagctgcgcggttggcgagtacaaaagcgagttgagcggcgcggatatcatcatcgcttctacccatattgcgggcgaaatcaccgtgaccggcaacaaatatgtggttggcgtgcgtaacatgctctctcctgctgacttcggcccgaaactgctggaagtgatcaaagaacatttcccgcaagacgtgaagtaaggatgcaacatgaaattacgtgattcactggcggagaataattctatccgcctgcaggctgaagcgaatacctggcaggaagccgtcaagatcggcgtcgatttactggtggctgccgacgtggtggagccgcgctattaccaggccattctcgatggcgttgagcagtttggcccctattttgtgattgcccccggcctggcgatgccgcatggccgcccggaagaaggggtgaagaaaaccggtttttcgctggtgacgctgaaaaagccgctggagttcaaccacgaagataacgacccggtcgatattctgatcaccatggcggcggttgatgccaacactcaccaggaagtgggcatcatgcagatcgtcaacctgtttgaagacgaagctaattttgaccgtttacgcgcctgccgcaccgcgcaggaagtcctggatctcattgaccgcaccaacgcggcagcttaagaaggaattgaaaatgtcattaccaatgttgcaggtcgcgctggacaaccagactatggatagcgcctatgaaaccactcgcctgattgccgaagaagtcgacattatcgaagtgggcaccattctgtgcgtgggcgaaggcgtgcgtgcggttcgcgatctgaaagcgctttacccgcacaaaatcgtgctggcggacgccaaaattgccgatgccggtaaaatcctctcccgtatgtgtttcgaagccaacgcggactgggtgacggtcatttgctgcgccgacatcaacaccgcgaaaggcgcgctggatgtggcgaaagagttcaacggcgacgtgcagatcgaactgaccggttactggacctgggaacaggcgcagcagtggcgcgatgcgggcattcagcaagtggtttatcaccgcagccgtgacgcgcaggccgcaggcgtggcgtggggcgaggcggatattaccgcgattaagcggctctccgatatgggctttaaagtgaccgtgaccggcggactggcgctggaagacctgccgctgttcaaaggcattccgatccatgtctttatcgcggggcgcagcattcgcgatgccgaatcgccggtagaagccgcacggcagttcaaacgctccattgcccaactgtggggctaaggagtggctatgctgtcgaaacaaattccgctcggcatctatgaaaaagcgctccctgccggggagtgctggctggagcgcctgcggctggcgaaaacgctgggttttgactttgttgaaatgtcggtggacgagaccgacgcccgactggcgcggctcgactggagtcgcgagcagcgcctggcgctggtgagcgcggttgctgaaaccggcgtgcgcgtgccgtccatgtgtctgagcgcgcatcgtcgttttccgctcggtagcgaagatgacgcggtacgggcgcaggggctggagattatgcgtaaagcgattcagtttgcgcaggacgtcgggattcgcgtcattcaactggcggggtacgacgtttactatcagcaggccaatgacgaaacgcgttgccgcttccgcgatgggttaaaagagagcgttgatatggctagccgcgcccaggtgacgctggcgatggagatcatggattatccattgatgaattccatcagtaaagcgctgggctatgctcactacctcaataacccgtggttccagctctatccggatatcggcaatctgtctgcctgggataacgacgtacagatggagctacaggcgggaatcgggcatatcgtcgcggtacacgtcaaagatactaaacccggcgtgttcaaaaatgtgccgtttggcgaaggcgttgtcgatttcgaacgctgcttcgaaacgctcaaacagagtggctattgcgggccctatctgattgagatgtggagtgaaacagcagagaacccggcggcagaggtagcgaaagcgcgtgactgggtgaaagcgcgcatggccagcgccggtctggtggaggcagcctaatgcaaaagctcaagcagcaggtatttgacgctaacatggatttgccccgttatggactggtgacgtttacctggggcaacgtcagcgctatcgatcgcgaacgcgggctggtggtgattaagccaagcggtgtcgcctatgaaaccatgaaggtagatgacatggtggtggtggatatggatggcaaagtggtggagggaggttatcgtccttcttccgataccgctacccatctggcgctgtatcaacgctatccgtcgcttggcggcgtcgttcatacccactccacccacgccacggcatgggcgcaggcggggatggctattccggcgctcggtaccacgcacgcggactatttctttggcgatattccttgtaccagggcgttaagcgaagaagaagtgcagggcgagtacgagctgaacaccggtaaggtgatcatcgaaacgctgggcgaggtggaaccgctgcatacgccaggcattgtggtgtatcaacacgggccgttcgcctgggggaaagatgcgcacgatgcggtacataacgcggtcgtcatggaggaagtggcgcgaatggcgtggattgcgcgcggtattaaccctggcctcaaccccatcgacgattatctgatgaataaacacttcatgcgtaagcatggcccgaatgcgtattacgggcagaagtgaagtatgagctccggaatgtgaatattatcgggatgtcacaggtctaattccagagccatctttccgcgaaaaaaagccccctgttcagggggcaaatcaactatgatttttcgttggttttcctgatgctagcgataaatattcgcgctggcgtgtatgttgccgttgctacccggttcccggataagtatgacgtgataatacattgcgtttcgcgcgtcggcctcgtcattcagcgccagattggcttcgctttccgtggcgaacttatggttgatgtagatcacgcctaagctgcgcacatcatccatatttctggcctggtgattatttaactcgatggctgccgttgccgttacgccaggcaaaagcgcagccagaaataacattatccgggctcgcatcatgtacctcctcagcagcgcggtctggttggcgatatccccctttagtgaatcgcttctggtttaattttaaccataacccgccgcagagatggcgaccttttctgatgctgttgttcaaaaaattatcgcattgtcgttttttacctgattaacaacccgttgatgtatgccgctatgtttaagaaaccctgtgtggcaaaaaagcgcgctgaccacagtgtcaattctctgccggaacaggccgtttatagtggcgcgcgatataacgttaatatctcagcagcaaaatgcgacgggacaggcgttacgttcggcacgataaataattgtacaatcaccttgagtttgcccgcaggcgccagtattataacgcgtcatttttcagccgacctttaacacgttccttgcctccatgggctgcggctgacccagacaggaggctgaataatccgtaaggagcaattcgatgcgtcattacgaaatcgtttttatggtccatcctgaccagagcgaacaggttccgggcatgatcgagcgttactctgctgccatcactggcgcagaaggcaagatccaccgtctggaagactggggccgccgtcagctggcttacccgatcaacaaactgcacaaagcgcactacgttctgatgaacgttgaagcgccgcaggaagtgatcgatgagctggaaactaccttccgcttcaacgatgccgttatccgcagcatggttatgcgtactaagcacgctgttaccgaagcttctccgatggttaaagcgaaagacgagcgccgtgagcgtcgcgatgatttcgctaacgaaaccgcagatgatgctgaagctggggattctgaagagtaatttctgatgaccaaccgtctggcgttgtccggcaccgtgtgcagggccccccttcgaaaggtcagtccatcaggaattccgcattgccagttcgtgcttgagcatcgttctgtgcaagaggaagccggctttcaccggcaggcgtggtgccaaatgcccgttattgttagcggacacgaaaaccaggccattactcacagtataacggtcggcagccgcataaccgttcaggggtttatttcttgccacaaggcaaagaacggtctgagcaaaatggttctgcatgccgagcagattgaattgatagattctggagactagccatatggcacgttatttccgtcgtcgcaagttctgccgtttcaccgcggaaggcgttcaagagatcgactataaagatatcgctacgctgaaaaactacatcaccgaaagcggtaagattgtcccaagccgtatcaccggtacccgtgcaaaataccagcgtcagctggctcgcgctatcaaacgcgctcgctacctgtctctgctgccgtacactgatcgccatcagtaatcggtcacggtccattaatacgactttgagaggataaggtaatgcaagttattctgcttgataaagtagcaaacctgggtagcctgggtgatcaggttaacgttaaagcgggctatgctcgtaacttcttggtaccaaagggtaaagctgttccggctaccaagaaaaacgttgaatacttcgaagcacgtcgcgctgaactggaagctaaactggctgacgttctggctgctgcaaatgcacgcgcagagaaaatcaacgccctggaaaccgttactatcgcgtctaaagcaggcgacgaaggtaaactgttcggttccatcggtactcgcgacatcgctgacgctgtgactgcggctggcgttgacgtggctaagagcgaagttcgtctgccgaacggcgttctgcgtaccactggcgaacacgaagtgaacttccaggttcacagcgaagtattcgcaaaagttatcatcaacgtggttgctgagtaatcaggcattctcgtttttgctagcaacgaaacgtcggcccagcgccgacgttttgcttttttaaccccatcgcttttcgactggctatctccccctcttttcgcgataatcaaaaataaaacattattttaatttcttggtgaaagaatggatacccaacgccaggcctccccgtttgcccgcaaaaacgtcgtttatgtgtgtgccgcattttgttgcttgctatggggcagcgcttatccagccatcaaaagcggttatgacctctttcagatagccaccgatgatatcccttctaaaattgtttttgctggttatcgttttttgtttgcgggtgggttgctactactgttcgcgctgcttcagcgtaaaccgattggtcggtttcgtccgcgccagtttgctcagttgacgttactggggctgactcagacgtcgctgcaatatctctttttctatatcggccttgcgttcacctccggcgtgaaaggctcaatcatgaacgcgacaggcacattcttcagcgtattgctggcgcactttatttatcagaacgaccgattgagctacaacaaaacgctcggctgtattctgggctttgcgggcgtcatggtggtgaacgtcagcaacggcctggatttcagctttaatctgccgggagaaggctccgtggtgctggcggcgtttattctttctgcggccacattgtatggcaaacgtctctcgcagacggtcgatccgatggtcatgactggctatcaattggggattggcggtctggtactggtcattggcggttacgtttttggcggtacgctgacgatacatggcttctcgtcggtggcgattttagtctacctgacgctgctctcgtcggtcgcttttgcgctatggagcattttactcaaatataatcgcgtggggatgattgcgccgtttaactttctgatcccgttttctggcgcggctctttcggctatttttctcggcgagaatatattggagtggaaatacatgattgcgctggtgctggtgtgttcggggatttggtgggtgaataaggtgaagcggtaatgcttcacctgaacgaatagggtatagacggggtaaggcgcagccggcgttactgtgcgcgaataaaactgccgtcaggctgacgcgtaaacagcacctgttgaccgttatcgccatctatcgttaaacctgtcaccaccccgctggcattctggcgaattttaatcatttgaccatttttgagattactcagcggtttgccagcgccttctacctgcgccattgcataaacgtctgtcgggggcagcccgtggtcacggaacagttgcgccagagttttaccagactctacccggtacgagcgccactgttgaccgatgccgctatcctgctggaaaggctgcgtctgcggctggttttgttcttccggctggccttcctggataggttccggcgcaacgggcgccacctgatccggatcgttttgcggcgcgaccagctgcgcctgaagctgggcctccgtcggcggctgtgattgcgattgcagatccaattgcgcttcccgcgtgacgacaggtgagtcgctggtctcgctggcgggcagcaggaaaccgatcaccagcacgatagcggcaatgataatgccacgacgatgcataggcggcagcggttccatgatgcgaaaattatccggcgcgtgccagattttcgccagggttggttttaattcaaagcgcccgggcatggtttacctcctgctccgcatctcgttccttaatcatagagtatagatggctaacgctatgatactggtagtgctatccgctttcgtgacatcaatacggataatctattgtttctttttccctgcgatttgtcatcctccctgagacaaagttttaccagaagaagcgtggctgttatgctgcccgctacttttttgatatccgatgaaggaaaaataatggccaccccgacttttgacactattgaagcgcaagcgagctacggcattggtttgcaggtagggcagcagctcagcgaatccggtcttgaagggctgttgcctgaagcgctggttgcaggcattgctgatgcgctggaaggtaaacacccggcggttcctgttgatgtggtgcatcgtgcgctgcgtgaaattcatgagcgtgcggacgcggtgcgtcgtgagcgtttcaaagcgatggcggccgaaggcgtgaaatacctggaagaaaaccgcgaaaaagacggtgtgaacagtactgaatctggtttacagttccgcgttctgacgcagggcgaaggcgcgattccggcgcgtaccgaccgcgtacgcgtgcattacaccggtaagcttattgatggcaccgtatttgacagctccgtcgcgcgcggcgaaccggctgaattcccggtaaatggcgtgatcgccggctggattgaagctctgactctgatgccggtaggttccaaatgggaactgactatcccacaggagctggcctatggcgagcgtggggccggggcctctattccgccattcagcaccctggtgtttgaggtggaactgctggaaattctgtaagcgccccgggtttgccggatgatggcgtaaacgccttatccggcaaccctgacttcagcagatgccaatattttattttgcaaatggcgtcgttacgtgtatttttgtgagctaattcgcattatcaaagtgatataacactcattttaaacataaaattaacattgtatttgaatcttagtattcatcccgccgattcttacctaatatcgatgagtcctgataacaggatcgtcgtatcatagaccaaaggccgtagagcccgcacaacacagacaggtacaggaagaaaaacatggtagatcaggtaaaagtcgcagccgacgaacaggctccggctgaacagtcgctacggcgcaatcttacaaaccgtcatatacagcttatcgctattggcggcgctattggtaccggtctgtttatgggatcgggtaaaacgatcagtctcgccggaccgtcgatcatttttgtgtatatgatcatcggttttatgctttttttcgtgatgcgcgccatgggggaattgctgctctcgaatctggaatataaatcgtttagcgattttgcttccgacctgcttggcccctgggcgggatatttcaccggctggacgtactggttttgctgggtagtgaccggtatggctgacgtggtggcgattactgcctacgcgcagttctggtttcccggcctttccgattgggtcgcctcgctggcggtagtgatcctgctgctaagcctcaacctcgccaccgttaaaatgtttggtgaaatggaattttggtttgctatggtcaaaatcgtcgccattgtggcgttgattgtggtcgggctggtgatgattgcgatgcactttaaatcgccgacaggcgttgaagcgtctttcgcgcatctgtggaataacggcggctggttcccgaaaggtattagcgggttctttgccggtttccagattgcagtgttcgctttcgtgggcattgagctggttggtactaccgccgcagaaactaaagatccggaaaaatcgctgccgcgcgcgattaactcaataccgatccgtatcatcatgttctacgtctttgcgctgattgtcattatgtcggtgacgccgtggagttccgtggtgccggataagagcccgttcgttgagctgtttgtactggtgggtctgcctgccgccgcgagcgtgatcaactttgttgtgctgacctcggcggcgtcttccgccaacagcggcgtcttctcgaccagccgtatgctgtttggcctggcgcaagaaggcgtggcgccaaaagcgttcgctaagctatcgaaacgcgcggtaccggcgaaaggcctgaccttctcctgtatctgcctgctgggcggcgtggttatgctgatggtcaacccgagcgtgattggcgcattcaccatgatcactacggtttcggctatcctgtttatgtttgtctggaccatcattctgtgttcatacctggtgtaccgcaaaaagcgtccccacctgcatgaaaaatccatctataagatgccgctcggtaagctgatgtgctgggtctgcatggcgttctttgcgttcgtgctggtattactgacgctggaagacgatacgcgccaggcgctgatcgtgacgccgctgtggtttatcgcgttgggtctgggctggctgttcctgcgtaagaacaaactggctaaatgacggatttatccctctcgcttaggcgagggggtatgcgcataacgtacccgccggggcgctttcttcatttttacgccccattttgtcgcttcccgctccttaacgagctatttttctcgccacatttgatagcgtatggagatgaaaagctcaggaaatgagtgtttgtccgctgatgcaatgacgcgaaaaacgtttcttcaggaagggcagctgtaaattgcaggctgacggtaagtgccgccttgatgaattcctataatggcggctcgcgctggataatacgttgaaaaagtggtttaagtaacaaattaatctcctatttcaaactgtaattatgaccattcgacgctggattttaagcgctacgcttttgctgctgcctgttcctgcgttcgcagattttcagtatcagcaggataaggacggcgttttttataccgccgacgacgaaccgcaaattctctcccgactgcctgacgttagctattcgcatttacggcgtattgccgatttatctcacccgcaagaccctcgcccgttaatagaaatcaatcccgacagccataactgcgacgacaatcatatttgtcagcacgcttatctcagcgatgggcgctttatcctgtgggcaggcaaaatcgtccagaataccggggatgagcctgccgttgatgttgccagctttcagtcttttggcgcctttgccgccgataaacacggtctctattttgatggtaaacgtcgtgatagcaatgcgggtgaaaaacgtgtggatatggcgactctggcagagacgaaaatctggaatctgctgcgggataaaaataatctctattatgaaggccgctggctggggcgggccgatgggtttcgcgtgttgaggctggattccacttcggcaagggagtttattgtgacgacggcgcaacgggtgattgtgaacggcatacccattaccgctgatgctaatacgtttcaaatcattcgctggatgcctggcgaggtactaatttatcgtgataaaaccggtaagcatgactatgagattgataattccagtcggtactgcggctattttaatattggcctgcgtgaggtgacatggctgaaacatgaggcaaccaacgccgggagcagttgtaaagtggaaaccctgccgggtgtcgatccggagtatttttttcgtctgaacgggaacaccggttggtataaggatcgtatttatcaggtgagcacgaatgcgttgggcgagggggtactgcgcatttttacgtcgcaggaaaaacttccggcgctgaaaatagatagagttacctataattactaccatctggctttgtccgcggatgggcaattatatcgccagatctcacgtgatcaatggcagcgctataacccgatattaacagagtggacgacggtatcaccagcgcccactgacgttatctctttgcttccctctgattaccactagcgcaggatggcgcaatgttgagaataaaacagttctgtttatcgattttattaatgctggcaccagtgttagctctggcctgttccggcattccatatgctttgtttcactatcagccgtgggggcagggaacgaaatatgtagttgaagaagattatgattatggtattaattttaaagatattgaaattcgagaggtaaaatttagtcaactacggcacgttcctgaccgcattgttaatgaatataatgaccgtggaaaaatgagtaatgattttgttcatgtcgccgctttttcatcgctaataaaaaatgatttctggcagttttattggctaaccgacggccagcatattttatgggttgggaaaatcgtacaaaatccaccgggtaagccgccagtggatgcagcgacttttcgggcgtatggacgctttgccgctgataaagatagtctttacttcgacggcgagcgcacagatgataatcatggtgaaaaaagggtcgatatagattcgttgcagcaggtcggcggcaacatcaaattaaacgactccggcgatgtgcttaaagacaggcgcaacctctactttcagggacgctggctggctagtgcgcagggatattccatcctgggcgttaaatcctgggagcagcgtaatattctgttttcgccgaccagctgcgatactacatctaatcctggcccgtgggacactattctgcgtaccgccacgcaggtttttgttaatggtgtggcaattgatgccgatccgaactcttttcatgttgtgcgctgggtcgctggcgtgcagttactctatcgcgacaaagcaggcgtaaaacgctattacttcggcaaagactgtctcaatacgtttaatgtacagcgggataaggtgacatggatgacgcgagaggcatcgcgccgaggcgatgactgccgaatagcgactattcccaatgttgatccagaatatttccatcccattcattacaattggacggtagcacagtacaaagatctattgtaccaggtgaagtatgtctctccggtcgacagggtattaaccatcacccgcttgcctgatccgcaggtacagctgaaagctggcgctaatttggtgggtaaacagatctattttatcggcgatgggggcgtgcagattatcgaccctattggaccattggtgtggtttaaaaatcccgatggttcattttctgatgtttttgctcatgacgatcgttatctctatttcttcggtgatacgctggtggatagcgggcaacggcgtaacgtaacgcggacgctggatactgcgcatatcgacaagagcggttattatctggtcactgaggaggggaaatatgaggttattaataatgcattcacctctcgctaaaaagcgttagtcgattcagaataaacgatcctgtctatacgttcaggatcgtttattggcggtggattattccccggccagcgcgcgtgggaacagcacgttattctccaggctgatgtgctccatcagatcatcaatcatctcattaatgccgttatacatcgctttccaggtggtgcaggcttctggcggcggcgttacattttgggtgacgtgtttgatgacgtctaccagctctcccgcctcgtcatgctcgctttccattacgcttatcgggcccgttgcctggcgacccataccctgtttgatcatggggaacaggatctgttcttctttcatcatatggctggaaagctcttcatgcagcgcggtgagatattttgtcaggccgcgtgggacgtttggcttatccgcgtgaacgcgttccactttggttgcctgcagaataagctccggcagttgttcgcgatgtcggtcatgatagcgaacaacgatatggtcaataatgtccgccagcggaacggcgcgccagtctttttcgatgggctgttcagccaattgcgccagttgcgcttcaatgatgtcaatatcgacgtcgtgacgcgcggcggcgcgtgccagcgtctgttttccaccgcagcagtaatccatatcgtactggcgaaacagcgccgatgcgcggggaatagagagcgccagttcgcctaaaggttgatcgcgataagccatagccgttacctcatttgcaataatataagttgtattctaaatgcatctttaaggcgaggctataacactttcggggtgcgtataatttaagcgagtatgaaattagcgttccgtgaccggaacgacggtcgctttttccggtttcgctctcacggcaatgaccacgcccgccaccaggagcgcaatgccgcttaacgtcaggaatggcgggatttcttggcgcagaatgaaggtatagagcagtcccgccagcgtttcaaaaacaatcagcggccctaaaataacggttggcaatttttggctggcgatattccagcacagcgtgcccacccaggaacacagcaccgcgatggcgatcatcagaccgataaacagcgcgggatgcgggccaaagggcagggtaaacaacggtttctggatactcagccacagacagaccgccgcatagccgattaacgagaccggcagcgtaaccagcgcctgcgccgttgcccacatcatgggatgtttgtcgggattttcccgcagccagcgggcgttgcgcagcgcataccatgcccagcacgctacggaaatcagcgccagcacaatgcctgaaccatagcgccagccgctaacatcggacaatccctgactaagttcagcaatattgacgcacagcaggccaaaaccgataagcgccagcgcgggcgctaaacgccgccaggataatctgccgtctcgttggctatagagaacgttagcgaaaagcggaatgacgaccggcaatgtcccgatgatcatcgtcgaaaccggcgcgccggttcgctgaatagcgctggcgaggcaggcgtaatagattacattgcccatcagagtcagcgacagggcggtgaaccagtctttgcgcgtcaactggcgtaaccgcgtgcggcctaaccaggcaatcggcagggcaatcagccccagcgccaggtagcgtcccattgactgtaagagggccgggtaatccggcacgattaacgggccgacgaaaatcaatccccacattagccctgccagcagggcgtatagcacgccgctaatcatcagattctcctcataaaccgttccgtcattatcagagaaggtctatgaggatgccacataaattaactaaattttaacacttacagtacggagcgaaggctttctgtgagcgtcgtcgtcgggcgaccgatgagtttacgcagcgtatggctgtcatcaaacaagccgcctttcgccgcgccagcgtcagaattggccaacatatccgccagtccgtcaggcaggcctgcgccttttaacgcggcggcaaaatcgacttcgctcaggttctggtagacgattttttttccgctctgatgagtaagttcatccgccaactggcgtaatgtccaggcgtcatcacccgccagctcgtagacattcccggcgtgaccctcttcactgatgacgcgcgcggcggcggcggcatagtcagcgcgcattgcggaggcgattttcccttgtcccgctgcgccaataaagacgccatgcttcagcgcggcagggacgctcgccaggtagttttccgtataccagccgttacgtaatagcgtgtgaggaatacctgactcagccagcatcttttccgtttcaatatgttcatcggcgagcgccagcggcgatttatccgcatgtagcaggctggtataggcgatgaatttcaccttcgcggcaatggcggcctgaataacgttgcggtgctgcgcggtgcgttgtcccacttcgctggatgatataagcagcagtttatcaacgccctgtaaggcggtggtcagcgcggcttcgttagcgtaatccgcctggcgaacggcgatcccgcgctgactgagcggggcggcttttttcgggttacgggcgatcgcgacgaggtgactggcgggcgtcgtttttagcaggttttcaataacgtgttggcccagttggcctgttgcgccagtgatagcaatcatggtgaactcctcagtgttggtcttgtgttttattacgctaccacctaaacttacttttagtaagtacgtacaaaaaggtaagtatcaatgcgcgctcatactctttcccggcagttgcgtgaaggtaatctctttgctgaacagtgcccgtcccgtgaggtgttaaaacatgtcaccagtcgctggggcgtactgattctggtcgcgttacgcgacggtacacaccgttttagcgacctgcgccgcaagatgggaggcgtgagtgaaaagatgctggcgcagtcgttacaggcgcttgaacaggacggatttcttaaccgggtgtcatatccagttgttccgccgcatgtggagtacagcctgacgccgcttggcgagcaggtgagcgataaagtcgccgcgctggcggactggatagaactgaatttgccgcaggtattggcgcagcgggagcgtttatcagatggcggctagcgctttattcggcctgccagtcaggccgaataaacgcagcgccatgcgggactcacgttacttgctcaaatccacctgataaatggcaaaaccgatatcatcgacagcaaccttcttcatcggatactgccctttctctttaatgaaggcagcggctttatcgcctggcgatgtttcaaagcggatatccagcgtcgtatcgctgtggattggcgccagacgccagttattatccgccgccggatggatttcgcccgcgcgttttgactctgcgccaatccatgccgccagcacggcgcgattttcatccggagacgcaaaggcgatatggctgtcgcccgtgccggcaaacttgtcgccgtaagcgcgatagttattcgtggcgaccaggaacgtagcgttcgggtcgacaggcttaccgttaaaggtcaggtttttaatacgttccgcctgcggattcaccatctggcattcgccatcatagcgggcgggctgtgacacatcgatttgataattcacgccgtcaatgacatcgaaattataggtgcgaaagccatcccaattgatcaacgattgcggtttgttgctgtgaatatcaatttgattaaactgtccggcagaacattccagccactcttttacctccttgccgctggctttcaccaccaccagcgtattcggatagagataaagatcggcggcgttacggaaggtcaactggcctttttccacttcgacaaagctggcaggatcgttcttacgcccgccaactttaaacggcgcggcggcggacagcaccggcagtttcgccagatccggatcgccctgaataaagtgttccacatacgctttttgcgcgttattcaccacctgtacggtaggatcgtcctgcaccagagcaagataactgtacatattatcggcggatttaccgatgggcttgctgacaaactcgctggtggcatcgtgatcggctttcagaataccgaccagcctactgtcttccgccgccagcgactttttagcggcggcgtcgtaaataggccgcgcttccgctttcgcctgcgtaacctgccatttgccgctgtcgttattgagcaccagatcgaccactcccagatggtcgccccacatgccaggcattaccgcaggaatgccgttaagcgtacctttggcgatatccgcgcctttgatgtcggcaaaatctttaccggggaagacggcgtgggcgtggccaaacataatcgcgtcgacgccgggaacttcgctgaggtaataaaccgagttttccgccatgctgtggtacggatcggcagaaaggcctgagtgagcaatgactaccacgatatcagcgcctttctcgcgcatttcgggcacatatttccgggcggtttccgtaatgtcattgacggtaactttgccgctcagattcgctttatcccaaatcatgatttgcggcggaacaaagccgatatagccgattttcagagtttgcgggtggccgtctttatcaataacgctcgtctctttaatcagataaggcgtaaagagcggcttttgggttttaacgtcgataatattggcgttaacataagggaatttcgcgccggccagcgcgttatgcagatagtccagaccataattaaactcatggttgccgaggtttccaaccgcgtaatccagagtgttgagcgctttatagaccgggtgaacatcaccgtctttgagcccttttgccgccatataatcgcccagagggctcccctgaatcaggtcgccgttatccaccagcacgctgtttttgacttcatttcgggcggcatgaatcaaacttgcggtacgtaccaatccgaatttttcggttgcggtatccttgtaataatcgaaatccatcatgttgctatgtaaatcagtagtttccatgatacggagatcgacggtggccgcattcacgctggcggcgatcagcgtagccagaagcgttgcactaaacttaatcatcagaggcaccttttaagaacgcaatagaaaagccggatagtgaaaaatagcgatgataaacagtgaaacccgatatcgttccgaccgtcgccagaagaaggcgaaactgcctcatccggccgattttttgcgagtgttcacagaaaggtgaatcatgccatgaaagctattatcaaaaccgctgacggtatcacagttggcggaacccttaacgatcgggtataagtaaaacaacgagttaacgcccctgtcataaagaggtggagaatgttagaacaagtatgccagcttgcacggaacgcgggcgatgccattatgcaggtttatgatggagccaaaccgatggagtacgcccgcaagcaggacgattctccagtcactgcggcggatatcgccgcacataccgtgattctcgaagggttacgcacgctcacgccggatattccggtgctttcagaagaagatccgcccgcctgggaagtgcgccagcactggcagcgctactggctggtcgatccgctcgacggcaccaaagagttcatcaagcgcaatggcgaattcacggtcaatattgcgctgattgagcagggcaagccggtgttgggcgttgtctatgcgccggtgctgaaagtgatgtactacgcggcggaaggtaaggcctggaaagaggagtgcggggtgcgtaagcagattcaggtgcgggatgcccgcccgccgctggtggtgattagccgttcgcatacggatgatgaactcaccgaatatctccaacagcttggcgaacatcagaccacctctattggttcctcgctgaaattctgtcttgtggcggaaggccaggcgcagctttaccccagatttgggccgaccagcgtctgggacactgccgcaggtcatgccattgctgttgcagccggggcgcacgttcacgactggcagggaaaaacgctggactatacccctcgtgagtcgttccttaaccccggcttccgggtgactatttactgaggagcttatgcagcaggtcgaccacctgctgtacctcttgctgggttaacgcgccatctttcacccattgaacccgaccgtctttgtcaagcacgatgacggcggacccctcttcttttaattgccaggcgttacgcgccacgccattgctgtcgacaataaattgcgaccacgggtagagctttttattactttctatactgctacgcacgaacataccggagccggggatcgcatcatcggtgttcacaattgtggtcgtctggtatctgtcatgcggaagcccggcggatttaatcgcttcaatcagcgtggcgtttttttccttcgctgacgttcgacccgcaatgtgcagcaggacgcgcacttttcccgccagctgcgcgctattccagtttttataactaaactcatctttattcaacgtcagttcgccacgatcggcaatgcctaccggcggcacccgttggttatcttcaaggttatgcgcacaagccattatggggagtagcagacacgacatcgccagaattttacgtagggtcatggtcattccttctttatttttttgcaggtgatccgaccactttgggccgacagttaatcatatgtgcgattgatgctttttcccgcaaaggggatgccagtttgcgggcgggcgcacacttcctgtgaaaaatgaaggcatatactgagaaaaatgagctgatgtttagataattctgaataactgtaatcaaaaggtaaatatacttatgcacactggaaacgacgtagatatggtctatagtcatatggcattaaaatttgcgccttaaaactgttgggccgattgtggcaccgcaagggcgtaatactctgcaggagacaacaatgaaaattttccaacgctacaacccgctacaggtggcgaagtacgtgaagatcctgttccgtggacggttatatatcaaggatgttggcgcttttgagttcgataagggtaagattcttatcccaaaagtgagagacaagcagcacttgtctgtgatgtctgaagttaaccgtcaggttatgcgtctgcaaactgagatggcgtaaccaaaagtgctatgcagtaggttaaaaaagtaaaaaaaaacggctcctgaatcaggagccgttgatgtttctggcaaacggatttcaggccgcgctgtcttctttgtcttttgcatcgggcagtttcggcgccggtacgttgcttttattgtcgagacgcgtcaccagcaactgatcgatacggtagttgtcgatatccaccacttcaaatttgtagccggaaaacttcaccgaatcagtgcgttttgggatcttgcgcagcataaacatcataaagccgccaatggtttcatagttgccggattgcggaaactcatcgatatccagcacgcgcatgacgtcgtcaatcggcgtgccgccgtcaaccagccaggaattttcatcgcgcgccacaatttgctcttccagtccctggccgaccaggtcacccattagcgtggtcatcacatcgttcagcgtaatgataccgacgaccagtgcgtattcattcataatgaccgcgaaatcttcgcccgccgttttgaaactttccagcgcctcagaaagggtcagcgtatccggcacaatcaaggtattgcgaatttgcacgccgctattcagcgccatactttggttcgccagcacgcgattcagcagatctttggagtctacatagccgatgatgtggtcgatatcttcattacacaccaaaaattttgagtgcggatgttcggcgacctttttcttcaggctttgttcgtcttcgtgcagatcaaaccagatgatactttcgcgcgacgtcatagaagacggtacggtgcgggattcaagttcaaacacattttcaatcagttcgtgctcttgcttgcgcaagacgcccgccagcgcgccggcttccaccactgcgtaaatatcatcagaagtaatgtcgtctttccgcaccattggaattttgaacaggcggaagatgttgtttgccatgccgttaaacagccacaccagcgggcgaaaaacgaacaggcagaagcgcatcgggttgatgatacgcaaagccacagcttctggcgcaatcataccgatgcgtttcggggttaaatccgcgaacaggataaacagccccgtcaccagcgagaaggagagaataaagctcagctgctcggagagttctggcgacatatagtgcgagaaaagggcggaaaaggcgggcgaaaatgccgcatcgccgacgataccgccaagaatagcgacggcgttcaggccaatttgcacaacggtgaaaaacatgccgggattttcctgcattttcaatacgcgttgtgcgttgatactgccttcatcagctaataacttaagtttaatcttacgtgatgcggcaagcgagatctcggagatggagaagaacgcacttacagcgatcaggcagaatataatgaatatactgtttaacatatcttatccggcgaaacgccagatcctcggaagggaagtttataaatccgtgtggtaacgtttaatgaaaaccggctcgtagcagtgagccgataagttcagggctagtatagcgtaagctactgtaaagtcgccagagggttcattttcaactccgacaagttccccctacgcctgcgtcgtcacgcgtcaggcggcaggcaaacgccgatcccgccaatcccgcagtaaccgtatggatttttgtgcagatactgttggtgttcatcttcggcgtagtaaaacggcgtcgcatgggcgatttccgtggtaatcgggcgatggtctccggcggcggccattgccgactgaaagcgctcgcgactggcgtgagcggcggcattctgttccggcgttaagggataaatcgcagaacggtattgcgtaccgtgatcgttaccctgttgcatcccctgcgtcggatcgtgattttcccagaaggtctgtaaaagctgctcataacggataacggcaggatcgtacactatccgtaccgcttcggcatgaccggtctgcccggaacagacttcccggtaggttggattaggcgtgtaaccgcctgcataccctgccgcggtgctatatacgccgggcaattgccagaataaacgttctacgccccagaaacagcccatagcgaagtaggcgatctccatcccggcagggacattggtcatagagtgttcatttaccgcatgcagagtggcgatcggcatcggggtgttgcgtcctggtaacgcatctgcttgagtaaccagatgttttttatcaaataaactcatgagctattctcccgaaagcgttaattggcgttaaggttgtaacgagacgcatctttgcacacaataacaacattaatgtatctggatttaaccataagaaatatttgggcagtcgtctgcttttcaatcgaaattgttgattttatgttaagccgcggagcggtagtgtgattttttccaggggtgggaataggggatattcaggagaaaatgtgccacatatccgtcagttatgttgggttagcttactgtgcctgagcagttctgcggtagccgcaaatgttcgtctgaaagtcgaagggctatccggagagctggaaaaaaacgttcgcgcacagctctctacgattcagagcgatgaggtgacgccggatcggcgctttcgcgcccgagttgatgatgcgattcgcgaagggcttaaagcgttaggctattacgaacccactatcaaattcgacttgcttccaccgcctgcgaaaggacggcaggtattaatcgccagggttacgcccggccagccggtgttgattggcggtacagaagtcattttacgcggcggcgcgcgcacggacaaagattatctggccttactgaaaacgcgtccggcaatcggcacggtgctgaaccagggagactatgacaattttaaaaagtcgttaaccagcgtgtcgctacgtaaaggctatttcgacagcgaattcgttaaaagtcagttgggaattgctctgggctgccatcaggcgttttgggatattgattatgatagcggtgagcgctatcgcttcggacctgtcaccttcgaaggttcgcagattcgtgatgaatatttacaaaatctgttgccgtttaaagagggcgatgagtacgaatcgaaagatttggcggaactaaaccgccgactttccgctaccggatggtttaattctgtcgtggtggcgccggaatttgagaaatcgcgtaaaacaaaaattctgccgttaaaaggcgtggtatcgccgcgaaccgaaaatacgattgaaaccggggtggggtactccaccgacgtcgggccgcgcgtgaaagcgtcgtggaaaaaaccgtggatgaactcttacggtcatagtctgaccaccagcaccagtatttctgcgccggaacaggtgctggattttagttataaaatgccgctgctgaaaaacccgctggagcaatactatctggtacagggcggttttaaacgtaccgatttgaatgatacggagcaggactcgaccacgcttgccgtgtcgcgttactgggacctttccagtggttggcagcgggcgattaacctgcgctggagtttcgaccactttacccaggggaacgtcaccaataccaccatgctgttctacccgggcgtgatgatcagccgaacccgctcgcgagggggactgatgccaacctggggcgattcgcagcgctattcagtagactattcgaatacggcctggggctccgacgtggatttctccgtgctgcaggcgcaaaacgtctggattcggactttgtacgatcgccaccgttttgtgatgcgcgccaatttgggctggatagaaaccggtgatttcgacaaagttccgccggatttacgtttcttcgccgggggcgaccgcagtattcgcggctataaatacaaatctatttcgcctaaagatagcgacggcaatcttaaaggcgcctcaaaactggcaaccggatcgctggagtaccagtataacgtcactggcaaatggtggggggcagtgtttgtcgatagcggcgaggcggtgagtgatattcgccgtagcgatttcaaaaccgggaccggggtcggcgtgcgctgggcgtcgccggttgggcctatcaaactcgattttgccgtaccggtcggcgacaaagacgaacacggtttacagttttatatcggtctggggcctgaattatgagtttatggaagaaaataagcctcggcgtgttgattttcattgtggtgttactggcgagcgttgcgtttctggtcgggacgacgacggggctgcatctggtattcagtgcggcgaaccgctgggtgccggggctggagattgggcaggtcaccggcggctggcgggacttatcgttaaaaaatatccgctatgagcagccgggcgttgcggtgaatgcgggcgaaattcatctggccgtcgggcttgattgcctgtggcgcagtagcctgtgcgtcaatgatctggcgctaaaagacattaatgtcgctatcgacagcaaaaaaatgccaccctccgaaccggcgcaagaagaggaagaaagcggaccgctgaacctctccacgccctggcccatcacgctgtcgcgcgtggcgttgaataacatcaatatcaagattgatgacactaccgtttcggtgctggattttacctccgggctggcatggcaggagaaaaacctgaccctgaaaccgacgcggcttcagggattgctgatcgcgctgccgaaggtcgctgacgtggcgcaggaagaggtggttgaacccaaaatcgagaaacctcaaccggatgaaaagccgcttggcgaaacgctaaaagatctgtttgcaaaaccagtaatgccggagatgaccgatgttcacctgccgctcaatctgaatatcgagtcatttcgcggcgagcagctacgcatcaccggcgataccgatctgacggtgcgcacgatgctgcttaaagtcagcagtatcgacggtaatatgaagctggatactctggatatcgacgccaaccagggcacggtgaaagcctccggtacggcgcagctcgccaataactggccggttgatattacgctcaacagtacgctgaatatcgatccgctaaagggtgaaaagataaaactcaaggtcggcggcgcgttacgcgaacaactggaggtcggggtgaacctttccgggccgatggatgtcgcgcttcgcgcccagacgcggctggcggaggccggtttaccgctcaatcttgaagtcgtcagccaacgcattgcctggccattgacgggtgatacccagtttcaggctgacgatctgaagctcaaactgagcggtaagatgaccgactatacgttgtcgatgcgaaccgccgtgaaaggacaagatattccgccggcgaccattacgctggatgctaaagggaatgagcggcagattaatctcgataaactcaccgtcgccgctctggagggaaaaaccgaactgaaagcgctggtggactggcagcaggcgattagctggcgtggcgaactgacgctgaatggcatcaataccgctaaagagatcccggattggcccgcgaagcttaacggcgtcatgaaaaccaaaggcagcctctacggcggcacctggcagatggatgtcccggagctcaagctgaccggcaatgtgaagcagaacagcgttaacgtcaacgggacgctaaagggcaacagctacatgcagtggacgatcccggggctgcaccttgcgctgggcccaaacagcgccgatataaaaggcgagcttggcgttaaggagctgaatcttgacgccgccatcgatgcgccggggctggataatgcgctgccaggactgggcggcatggcaaaaggaatcgttaaagtccgcggtacggtagaagcgccgcagctgttggcggatatcaccgcccgcggtctgcgttggcaggagctgtctgtcgcccaggcgcgcattgagggcgatattaaatccaccgatcagatagcgggccatctcaacgttcgcgtagagcggatttcgcagcccgacgttaacatcaatctggtgacgcttgacgccaaaggcagcgagaagcagcatcagctacagctccgtgttcagggagaaccggtatccggtcaactttccctgacaggcagttttgatcgcgaggcggcgcgctggaaagggacagtaagcgacacccgtttccagacgccagtggggccatggtcgttgacccgcgcgattgcgctggactaccgtaataaagaacagaaaatcagtatcgggccgcattgttggctgaacccgaacgccgagctgtgcatcccgcaaaccattgatgcgggcgccgcaggacgggcggtggtcaatctcaaccgctttgatctggcgatgctgaagccatttatgcctgataccacgcaggccagcgggatctttagcgggaaggcggacgtgtcgtgggacaccacccaggagggattgccgcaggggaaggtcacgctttccggtcgtaatgtgaaggtcacgcagaccgtcaatgacgcgccattaccggtcgcgtttgagacgctgaacctcagcgccgatctgcacaataatcgcgccgagctgggatggctgattcgcctgacgaacaatggtcaattcgatggcctggtgcaggtaaccgatcctcaggggcggcgcaatctcggcggtaacgtcaacatgcgcaatgtcaatctggcgatggtcaaccctgtcttttcgcgcggcgaaaaagcggcgggaatgttaaacgccaggctacgtctgggcggcgatgtgcaaagcccgcagttgtttggtcagttgcagcttagcgcgctggatattgacggtaattttatgccgtttgagatgcagccgagccagctcaccatgaactttagcgggacgcgttcgacactcgccggtatcgtgcgaacacaacaagggcaaattaacctgaacggtaacgccgactggagtcagattgacaactggcgcgcgcgggtgacggcgaaaggcagccgggtgcggattaccgttccgccgatggtgcgcctggatgtctcgccggatgtggtctttgacgcgacgccttcgctgttcacgttggatgggcgtgtggacgttccgtgggcacgaattgtggtgcacgacctgccggagagcgcggtcggcgtctccagcgatgtggttatgctcaataatgacctgcaaccagaaacgccgcagacagcgtctattcccatcaacagtaatctgacggtccacgtcggcaacaacgtgcgcatcgacgccttcgggcttaaagcgcgtttgaccggcgatttgaaagtcgcgcaggataagcaggggctggggctgaatggtcaaatcaatattcctgacggccgattccgcgcctacggccaggacctgcttgtccgtaaaggcgagctgctgttctccggcccgccggatcagccgctgctcaatatcgaagcgatccgtaaccctgacgccaccgaagacgatgtcattgcgggtgtgcgcgtcacaggcactgctgatgaacccaaagcggaaatcttctccgatccggcgatgccgcaggctgaagcgctttcttatctgctgcgtgggcaggggttggacagcaatcagagtgatagcgcagcaatgacctccatgcttattggcctgggggttgcgcaaagtggtcaggttgtgggtaaaatcggagagacattcggtgtaagtaatctggcgctggacacgcaaggggtgggcgattcgtcccaggttgtggtcagcggctatgtactgccgggtctacaggtgaagtatggtgtagggatatttgactctctggcgacgctcacgttacgttatcgcctgatgcctaagctatatctggaagcagtgtctggcgtagatcaggcacttgatttgctctatcagtttgagttttagcaatgcgaatatttgtctatggcagtttacgacagaaacaaggcaacagtcactggatgaccaatgcccaattgcttggcgattaccgtatcgataactaccagttgtatagtctgggccactatccaggcgcagttccgggaaacggagcggtatacggtgaagtttatcgaattgataacgccacgctggccgaacttgatgctttgcgcaccaggggcggtgaatacgcacgccagttaatccagacgccttacggcagcgcatggatgtatgtatatcaacgtcctgttgatgggttaactctgattgaaagcggtgactggttagacagaaaccagccctgaactgaacacgccaccctcgggtggcgttgttttttacattctggctgatggcgttaacgccgggcatggtgagctcttattctgccgtaaatcaataatgacgcgccgcccaggataacaatgcatccgagaaccataaatccctgcatatagctgccggttgtccggtaaaaatagccgaccattaggcctgccaacgtaccgccgccgccggcgccgatgccattaataataccggaggctgggccaatcgcatggggtttaacgttcgactggataatcgaccagatattgggggtaaagctggcggcataataacccatcgccagggtaatgagcgtgattttaaagcccggcgcatcgacaaatggcaggagaaataacatcacgccggggattagtaggcccagtgaagcaataagtacacgcttttgtgtcttatcactgatccatgagatagggattgccagtataaccgcagtcagataaggcagagaactgaccaatgctttactgaatccggtatagccgagagaattgacaaccatgggtatccataacgtaattccccagaacaacatcccttgagtgatgtaggtaaaaataagaagtaggaagggggttccgcccagcgattccagggtaagtttagttttctctgttggcgccggcgcacgataataaggcgcttcttcctgttttttcagcattgttatataaagtggaacaacaacaacaatgccgatcacaccagtgataataaaaacatttcgccaaccgaaggcagcatccagcggggacaaaatcataaatcccaggcctaatgccaggaactgtccataatactggataatactattcgcctgcgtccgttctttgtctgaaaaccagtcgctggcgaagcgggactgctgcggccaataaatgccttcggtaatgccaagcaccagccgacaaatcaaaataacgtacactgacgaggtaaatccgacaaaaacggtcgcaatcgaccagattagcaccatcagaatgactatttttttcggatcgtatcgctgggtaaatacgccgccaaaaatatttgaaaaggcatagccaataagaaatatggttaatacaatgctggccgttgcgccatcaatattcaggtcgtgtgtaatcgtaggtaacgtaacggaaagattagaacggtcaagataagcaacaaaaaggccgaacattaatgtcgcgccgatccgtagccatttttgtattgaggtcatttttcaactccgtttggccgcgcgccaaaatcaatttgacgaaataatatctcaccggattttatggtcatttgtggtaccagcacatgcgtccccgtgagcgtttcaccatgaatatcggcaaattcaacatgcctgttttttaatttaaagatggcgatatcggcaaatgccccaggggccagcgtaccaatttctgctgccatacccattaaaactgctggggtatgggtacaggcgttaatgacatcggtaagcgcgacgccgagtgctaaatatttcgataaaatccatggtaaggcgtaaacaggccaggcgagtttagtgatggttgagagatcgctactgatgatatccggaagaaagccattggcgatggcccggcgtgccgtgttcattgaaaaatggctgcgaccattggcggcatcaaatataacgcctctttcccttgcctgacggacttcggctaagacagcgccttcatcagtaagaatggtgctacctttgccgtgaaacgcatgagcgataatatcgccgcggcgtagcaaggagacaagttctttcatgggaacgacgggatgagtcgagtgtattgctacggggcaccttaaatcgttggcaatacgaagggattcagtcagcggttttaagccatattcagcaatgtcctcagtctgaaccttgagttttaatccctgaagaacgttgcgatactggcgaaacagcgcgtggatcttattttcatcaatattgtcaggatcataattttcttgtgaccaggtttggcccggcggcgacacggtcagaaacgctttgattcgaactttgctggcgcaaatcaccgttcggtagaaggcatcaaagtttgccgtaccggcagaacctgcatccacgacggtggtgacgccattcggcggcatgtacatatcaggcctgacgccgccttccgtcgcgtcataaaaaacatgcgcgtgataatcgataagaccgggagtgacgatcatgccgtcggcatggataatccgggtctccgaagttacaggatatttatcggcatcaacgataatatcgttaatgatgcgtaaattgttaatctcattaatattacgagcgggatcgatgatatgtccaccggtaattaatatatcatttttcatcataatctcttaaagtagtaaataattatggcagcccttaaaaatatattaaaaagtgtgttttgagcggatgttatgttggattaaaaatacggttattggtagggagagcttaggatgccttattaaaaaggtaatcgggcttatgcactaaataagaatttggcgcttgctaatatttagggcgtaagtccatgggagtctgcgggaattcacaaaaaaattattatcttaagctttttagagaaagcgtgagtgtattcaaccctttttaataaaaaatcaggtaaagtcttattcattccgtgaatgttaaactaataatgataaaaattgtgctctattcattagccaataaaaaggccctcattactatgagagcctttatcttgacgcttatgtaaaagcgaacttatttcttcgctgcgcgctcgaaggaggcaacgatttccgctttagccgcttcggcgttgtcccaaccgtcaactttcacccatttgcctttttcgagatctttataatgctcgaagaaatgagtgatctgcgctttcagcagttccggcagatcgttcacatctttaatgtgatcgtactctttgctcagtttggtgtgcggtacggcaaccagtttcgcatcttcaccggattcgtcggtcattttcagtacgccaaccggacggcaacggatgacggcgcctggctgcagcgggtacggcgtcgggaccagaacgtctaccgggtcgccgtccagagacagggtatggttgatgtaaccgtagttgcacggatagaacatcgcggtggacatgaagcggtcaacgaacagcgcgccgctctctttgtcaacttcgtatttgatcggatctgcgttagccgggatctcgataacgacgtagatatcttccggcagttctttacccgccgggacgttgagtaagctcatgtctgtttcctttgaatttatgacaaacaagtggcgagtattatagccaactcacgccgaaagtcttcgcttgttttcgtttccgcctcatctggcgcgtcgttgcggagcataaacgacaaaggttaagaaccggaaaaatcacgggcctgataaggcaacgccgccatcggacatgttattgcccaatggcggcttcatgcgttagtccgcatggtggtaaagattacgcgtccgggtattcgcggataaagcgttccacatcgtcaaccatatggcggttgccaacgaagaacgagcggcgctggtgcaggctttccggaatgatatccagaatacgttctttaccatcgcttgctttgccgccggcctgttccgcgaggaacgccatcgggttgcattcatacagcagacgcagttttccctgcggatggctggcggtgctggggtagagatagatgccgcctttcagcaggttgcgatggaaatcggccaccagagagccaatgtaacgtgaggtataagggcgacttgttgaactatcctcttcctggcagaatttgatgtacttcttcacgccattcgggaatttaatgtagttgccttcgttaatggagtaggttttacccttttccgggaaacgcatacgttcctggcacagacagaacacgcctaacgacggatcgtaggtgaaagcgtgtacgccgcagccggtggtgtaaaccagcatggtggacgagccatacacgacatatcccgcagcgacctgtttgttgccgggttgcaggaaatcttcttcggtgactggcgtgccgacgggcgtcacgcggcgataaatcgagaaaatcgtaccgacagagacgttaacgtcgatgttagaagagccatccagaggatccatcagcaccacatatttcgcgtgttcgcagccttcaaagacgacaatttcgtcctcttcttccgatgcgatgcccgctacaatatcgcgcgcttttagtgcagctttcagtttctcgttcgcgaacagatcgagtttctgctgaacctcgccctgtacgttctcagcaccgctggcacccaggatatcgaccagaccggccttgttgatatcgcggtggatgatcttggcgcccaattttattgccgacagcaaagcagtgagctcaccggtagcctgagagaactcgtgctgcttttcgacaataaattcacctaacgttttcataacactttccctgcaattgattggagtaaagcgaccgtaacaatcttaacaaacatttcagatgatgcgctcaggtgaatcgcgccagcaaagtacagatttacctgaaatgcgtttctcacttgccagacatgtgcgtaaaatggctcgcagataaaaaaaggatagtgacgtatgcgcattcatattttgggaatttgtggcactttcatgggggggctggcgatgctggctcgctcgcttggtcatgaagtaacgggttcggacgccaatgtgtatccgccgatgagtaccttacttgagaagcaaggcattgatctgatccaggggtatgacgccagccagctcgatccgcagccggatctggtgattatcggcaatgcgatgacgcgtgggaatccgtgcgtggaagcggtgctggaaaaaaacattccctttatgtctggtccacagtggctgcatgactttgtgttgcgcgaccgctgggtactggcggtcgccggtacccacggcaaaaccacgaccgcaggcatggcgacctggatactggaagcgtgcgggtacaaaccgggcttcgtgattggcggcgtaccgggcaactttgaggtttccgcgcgcctgggcgagagcccattttttgttatcgaagcggatgagtacgactgcgcgttctttgataaacgttctaaatttgtgcattactgcccgcggacgttgatcctcaacaaccttgagtttgatcatgccgacatcttcgacgatctgaaagcgatccagaagcagttccaccatctggtgcgcatcgtgccggggcaggggcgcatcatctggccggaaaacgacatcaacctgaaacagaccatggcgctgggctgctggagcgagcaggagctggtgggcgagcagggacactggcaggcgaagaagctgactacggatgcttccgagtgggaagtgtggctggacggcgaaaaagtcggcgatgtgaaatggggcctggtcggcgaacataacatgcacaacggtctgatggcgattgccgccgcgcgccacgtgggcgtcgcgcccgcagaagcggccagcgcgctggggtcatttattaacgcccgccgccgtctggagctacgcggtgaagcgaacggcgtgacggtgtatgacgattttgctcaccatccgacggcaattctggccacgctggcggcgctgcgcggtaaagtgggcggcaccgcgcgcattatcgcagtgctggagccgcgttctaacacgatgaagatggggttatgcaaggatgacctggcgccgtcgttagggcgtgcggatgaagtgttcctgctgcagccgccgcatattccgtggcaggtttcagaagtggcggacgcctgcgtacagcctgctcactggagtggagatgtcgatacgctggcggaaatggtggtgaaaaccgcacagcctggcgatcacatcctggtgatgagcaacggcggtttcggcggcatccatcagaaattgctggatgggctggcgaaaaaagcactggttgtggagtaaaaaatgcccggtggcgctgcgcttaccgggcctacaatacgtacattcccgtaggccggataaggcgccagcgccgccatccggcagacgctatcaacgtgtaaaattacccttcgttttccgccagctcgcgcagatactggaagatctgacgcgctgatttcggcggtttgttgccttctttctctttcttcgcattgcggatcaatgaacgaagctgttgacgatcggcgtgcggccacagggtcagtacttcggctaccgcgtcatcgccttcgacgatcagacgatcgcgcagatgctcaagcttgtgaaacagcaccacctgctgattatggcggtttttcagcttgtccagcgcctggcgaataggttcaacgtcgcgttggcgcagcatttttccgataagctgcaactggcggcggcgtccttccattttgatacgctgggccagttcaatggcgtcgcgcagatcggcgtccagcgggatcttatccagcgcgtttttccccagatccaccagttccgcgcccaggcgttttaattcctcggcatcgcgtttaatttcacttttactgacccagataatttcatcgtcttcgtcttcgatgtcatcaccgggaacgtcgtcgagccagtcttcgggctgctttgtcatgtcaggctccttaaaaaaagaggctaatgttaccagttaagatgcgcactgaaaaacggttctctgttagacttcagagaaactctctctacattatggcatttgcaatgaaagtaatctcacaagttgaagcgcagcgtaagattctggaagaagcagtttcgacagcgctggagttagcctcaggcaaatcggatggggcggaagtcgccgtcagcaagaccaccggcattagcgtcagcacccgttatggtgaagtagagaatgtcgaatttaatagcgacggcgcgctgggaattacggtgtatcaccagaaccgcaaaggcagcgcctcttcgacggatttaagcccgcaggcgattgcccgtaccgtgcaggccgcgctggatatcgcgcgttacacgtcgccggacccgtgcgcaggcgtggcggacaaagaactgctggcgtttgacgcgccggatctggacttgttccacccggcagaggttacgccagacgaagccattgaactggccgcgcgtgcggaacaggcttctctaaaggcggataaacgcatcaccaataccgaaggcgggagctttaacagccattacggcattaaagtgttcggcaacagccacggcatgttgcagggatattgctccacgcgccattcgctctcaagctgcgtcatcgccgaagagaacggcgatatggagcgtgattacgcttacaccatcggtcgggcaatggcggatctgcaagcgccggaatgggtcggggccgagtgcgcgcgccgtaccttatcccgcctgtcgccgcgcaagctctccaccatgaaagcgccggtcattttcgccaatgaagtggcgacagggctatttggtcatctggtcggggcgattgccggcggcgcggtataccgtaaatccacttttctgctcgactcgctgggcaaacaaattctgcctgaatggttaaccatcgaagaacacccgcatctgctaaaagggctggcgtcttcaccgttcgacagcgaaggcgtgcgtacggagcgccgggacattgtgaaggatggcgtactgatgcaatggttgctgaccaactattccgcccgcaaactggggctgaaaagtaccggtcatgccggcggcattcataactggcgtatcgccgggcaggggctgaactttgagcaattgctaaaagagatgggcaccggcctggtggtgacggaactgatgggccagggcgtcagcggtattaccggcgactactcccgcggcgctgcgggattctgggttgaaaatggtgaaatccagtacccggtaagtgaaattaccattgccggtaatttaaaagagatgtggcgtaatattgtcaccgtgggtgatgatattgaaacgcgcagtaatatacagtgtggttcggtattgttaccggagatgaaaatcgccggacaataatacccgtcatacttcaggctgcaggcgcgttggctgcctgcgacccgaattattcagggtattacacttatcgttaataataaaaaaggaagtgagcaatgcgtaaaagcctgttagctattcttgctgtgtcatcgctggtattcggttcggctgtttttgctgccgatcttgaagataatatggatattctcaatgataacctgaaagttgttgagaaaacggatagtgcccctgaactgaaagcggcattaaccaaaatgcgcgcggccgcgctggatgctcaaaaagctacgccgccaaagctggaagataaagcgccggatagcccggaaatgaaggattttcgtcacggttttgacattctggtcggccaaattgatggcgcgctgaagctggcgaacgaaggtaacgttaaagaagcgaaagcggcggcggaagcgctaaaaaccacccgcaatacgtatcataagaagtatcgttaatttttgtgggatggcggcttcgctttatccgtaggtcgccatccggcaaaatgtaatacccatcacactttctcactttatacgacaacgtcattgtttcgccatttcctctttatgccgcgatagatctcacactttcccggcgataattcattaatgccgccttttctgtggcgcagatcacctatcccactcgcgtttccacttcgaggtggaaaataactcgctacaaacttttaacccttaccgctagttttatctcattgccattaacggggtgagacgcgtggataacggagcagtaaaacacgatgctggtgagcgaattaacgaactggctgaacaggtgttaacgcaggtggatagcctgctggggcggcatcacattgtccccaatgcggtacagacgcaaatgctgacctcgcacgttcgcgcgatggcgcaccggtcaattaccggcgagcctttaccggaagtcgatgccagcttgtttgatgaaatctcagccgaatcaatggcgctcgcccgcgaaatcgtggcggcgtttggcaaccttcctgacgaagaagcctggctattatcggtacattttgaagtcgcgaaagacaacctctaaggagcaaaaaatggaacagattaccgtcgtgattggcgatcgcctgggtaaaggccagaaagtagcggcaggcgtggaaaaagcgggcggtcgcgcggtcgtcgtaccgggcgtcgcggcagacatgaagctgggcgatgtgatgaaagcggaaaacgccaccttcggcatttcattttgcggcagcggcggcgcgggcgctatcaccgcgcaaaacaagcatggctacaaagccaaatatggaatgcggtcagtggatgaaggcgtcaccgctatcaatgaaggctgcaacgtgttgggtttcggctttatggataaagaagagctcggcgagcgcctggtgcaggcgtggcaaaagaaatacggcgcctgatgatgaaagagcaattcaccaccacggtgagagtaaaaggcaagggcgacgccaaagcacgcgcctttgccgatgcgctgaaccatgttcagtcggcggtgatgagagagtcgccgtatatcttactgcgtattgagccacaggatgtgcggattgttcaggcgcatgagtcggtgcgtaaagaggcctttctgtttttctttttgcgccgggaacgacgcacttacagcgtggagctggatgtgaccgtcaacgtgaccgccatcaatctcgacagggtggatttcgtcgcgaaacgctgatttttattaaaaaggcatagttatgttcctgataatactaattaaatcgctcattatcggcgcgctggtcggcgtaggggtgggcgctggggctgcacgcatgtttcacgcgccaaccacgcaggggatgggcgcgttccgtacgttgggcgaactcaactcttgtgaaggcgacccggcatctcacttctcctttgggctgggtttcttctttaacgcctgggcgtcgtctgtggcggccggatcgttcacccaggatgtcgatcaccgcatcatccctaactggggcgcggcggcgctaatgatcaaaaaccgtaacgtcggcgagacgctgcacgacccgaaaaaaatggcgatcgcctgcgccgtcatcggcatgattgtcgtaacgttccttaacctgaccgcctcatccgtgccagaagcgctacaggtgacggcggttaaggtgctggtaccggcggcaaacctgctggtcaatatcgtcatgcctgtgatcttctggttagcggcgatcgacgctggtaaaaaatcgggcttctgggccaccgttttcggcggcgcggcgcagctcatcatggggaacgccgtaccggggctggtgctgggtattttgatcggcaaaggcgtagaagagagcggctggaaccatgtcaccaaagtgatgatggtcgccatcgttttgctgtttgtgttgagcggcttcttccgcggcttcgacatgaaaatgatcgagtctttcaacatgacggtaccgaactggcttgaactgatccacaactcgctcagcggcaaataacggaggccacaatggaagagaataaaggtttttggtatgccgactggtcgttcccgatctttgttggcctgctctcctccggcgttttcgccgggacgcatatgtactatctgtacggcatcggcgcatttaacgaagtcgcttttgtggcgatgttgaaagcggggatggataccggcgtctacggcgcggtcgccgctttcggcgccagctttttatttgcccgcattatcgaaggttcgctggtcggaattctggatatcggcggggcaattcagaccggcgtgggcttaggggttccggcgttattgctgggagccggctttgtcttcccggtggcgaactttatcgcttcgctgataaccggtctggtgattggcctggcgattggctacatcattattctggcgcgtaagttcaccattaatcagagcgactccacgtacggagcggacgtcatgatgggggccggtaacacttcaggccgttttctggggccgttaattatcctcagcgccatgacggcatcgattcccattggtctgggctctctggtgggcgcgctgctgttttatatctggcagaagccgattaccggcggcgcgattttaggcgcgatgatcctcggttccatcttcccgattgcgattagctaactgttgatttgtaggccggataaggcggttgcgccgccatccggcaaaggagagagcgatgtttgatttactcctgcgccatgcgcgtctggtcgatgacacgctgactaatattgccctacaagatggcaaaatcgcggtgttgggtgacgttgatggtccggcggtgaaaaccattgacctgcgcggcgagtgttacgttagcgcgggttggattgattctcacgtccactgctacccgacatcgccgatttaccatgacgaaccggacagcgtgggtattgccactggcgttaccacagtggtggatgcaggcagcactggcgcagatgatattgacgatttttacaccctgactcgtcaggcgaccaccgacgtttatgcgctgctgaatgtttcacgcgtcgggcttattgcccaaaacgagctggctaacatggccaatattgacgctgatgcggttcggcaggcggtaaaacgccatccggattttatcgtcggcctcaaggcgcggatgagcagcagcgtggtaggcgttaacggcatcacgccgctggaacgcgctaaagccatgcagcaagaaaacggcaacctgccgctgatggtacatattggcaataacccgccggatctggacgaaatcgcggagcgtctgacggcgggcgatatcattacccactgttacaacggtaagccgaaccgtattcttcggcctgacggcgagctgcgcgcctcggtgacacgagcgctggcgcgcggcgtgcgtctggatgtcgggcatggtaccgccagcctgagctttgcggtggcgaaacgcgctattagcctggggattttaccgcataccatcagttccgatatctactgccgtaaccgcatcaacggcccggtacattcgctggctaatgtgatgtcgaaattcctcgccatcggcatgtcgctgccgcaggtcattgcgtgcgtgacggccaatgccgccgatagcctgaatctgaaaaccaaagggcgtcttcagctaggtctggatgccgacctgaccctctttacgcttaaacgccagcccaccgtgttggtagacgcggaaaacgacagcttacaggctgaagaattgctgacgccgcttgccgcgatacgcgcaggcaagggctatatgaccgaacaagggagcgcggaacatgccttcgatttttgagaagtatcaattaaaacaggtgattaacgcctccggacgtatgacggcgctcggcgtctctacgccgcgcccggaagtgatagacgcggcgatggccggaatgaatcagtatttcgagatgaaagatctggtgaataaaaccggcgagtacattgcgaaattgctggaggtggaaggggcgacggtagtctcctgcgccagtgcgggtcttgcccagtcggttgccgcggtactggttcaggacagcgactggctgctggaaaacctgcacgttacaccgattgaaaataacgaaatcgtcctgccaaagggccacaacgtcaactttggcgcgccggtgggaacgatggtggcgctgggcggcggcaaactggtggaagccggttacgccaacgaatgttccgccgcgcagttggcggcggccattacgccgcgcacggcggctattctctatatcaaatctcaccactgcgtacagaaaagtatgctcaacgtggagcaggctgcggtggtggcgcgtacgcataatctcccgctgattgtggacgcggcggcggaagaagatttgcagtgctactaccgcgtgggcgcagatctcgttatctatagcggcgcgaaagcgattgaagggccgaccagcgggctggtgattggcaaaacgcagtatgttgagtgggtaaaacgtcagtcagcgggcattggccgggcgatgaaggtcggcaaagagggaattgttggcctgacctgcgccattgaattgtacctgcgggcgcaaaaagagagcggcgcggagatggtagaaaaaatggcgccctttatcgacacgttgaacacgtttaacggcgtcagcgcccgcgtggtgtgggacagcgccggacgcgacatcgcgcgcacggaaattaagtttgatgaagccgttaccggcatcgccacaggcgaactggtcgacgcgctgaagcaaggagaatacgcgatttactttcgcggatacaaagccaacgaagggattattgaagcggatgtccgcagcgtcgatcgcgcgcagttagcgattgtggcgcgtcgtattggcgaggtgattaatcaggagaaacaagcatgaaactgacccctaacttttaccgcgatcgcgtttgcctgaacgtactggccggttcgaaagataacgcccgggaaatctacgcggcggcggaaggtcatgtgctggttggcgtgctctccaaaaactatccggatgtggcaagcgcagtcgcggatatgcgtgaatatgcggcgcttatcgataatgcgctctccgtcggactgggggcaggcgatcctaaccagtcggcgatggtgagcgaaatctcgcgtcaggtacagccgcagcatgtcaaccaggtgtttaccggcgtaggggccagccgggcgctgctggggcaaaacgagacggtggtgaacggtcttgtctcgccgaccggcacgccgggacgggtgaaaatttccaccggcccgctaagcagccgcgcgccggacggcatcgtacccatagaaacggcgattgcgctgctcaaagatatgggcggcagctccgttaaatactttccgatgggaggactcacctgtcgcgacgagtataaagcggtggctgacgcctgcgcccgccatgatttctggctggaaccgacgggcggcatcgatctggaaaacttcgccgagattctgcacatcgcccttgatgcaggtgtaagcaaaatcattcctcacatttatagttcgattattgataaggtgagcggcaacacccgtgcggacgatgtacgtcagttactcgctatcgtccggtcgcgtgtcggctaatcatgaggagagagacgtgcgattccccaaccaacgtttagcgcagctatttgcgatgctgcaaaacgagacgctgccgcaggatgagctggcgcagcggttgtcggtctccacgcgtaccgttcgggcggatatcgccgcgctgaacatgttgctgacgccgcatggcgcgcaatttactctcagccgcggcaacgggtatcagctcaaaattgatgatccggcacgttatcaatccctgcaaacgcagcaatctcccgccctggcgcgcggtccgcgcaccagccaggagcggatacactatttgctggtgcgttttttaacctccgccttctcgctgaagctggaggatttagcagatgaatggtttgtcagccgtgcgacgttgcagaacgacatggcggacgtgcgcgagcatttgctgcgttatcatctgacgctggaaacgcgtccgcgtcatggcatgaaattgtttggcggagagatggcgattcgcgcctgtctgaccgaccttttatggacgctggcgcagcaggagccctctcatccgttaattgttagtaccacgctgaacaccgaggtgtctcaacggctgcggtctcttttgccggatattttctctcattgtcaaatccgcctgaccgatgagggcgagctgtttctgcgtttatactgcgcggtggcggtacggcgtattcgcgaggggtatccgttatcggaatgcgtggcagaggaggtcgatgaaaaagtgcgccatgcggcgcatgagattgcggagctactacaacagctggccgacaagccgctgtcggagccggaagtaagctggctgaaggtgcatattgccgcccgccaggtacaggaaattgcccccagcgccattaatgccgatgatgaagaggcgctggtgcgctatatcctcaattttattaatacccagtacaactataacctgttgaatgataaacagcttcacgcggacttgctgacccacatcaaaacgatgatcacccgcgtgcgctaccagatcatgctccccaacccactactggaaaatattaagcagcactatccgatggcgtgggatatgacgttggcggcgatatcgagttggggaaaatacacgccgtataccattagcgaaaacgaaatcggttttctggtgctgcatattggcgttgggctggaacgtagttacaacattggctaccagcggcagccgcaggtactgttggtgtgcgatgctggtaatgcgatggtgcggatgattgaagcggtactggcgcggaaatacccgcagattgagattgcccgcactctgacgctacgcgactatgaggcgcgggacagtattgtggaggattttgtgatttccacggcgcggatcggcgaaaaagataaaccggttatcatgatcgccccctttcctaccgactatcaattggagcagatcggtaagctggtgctggtggacagaacccgtccgtggatgctggataaatatttcgatgcctcgcattttcgcatcgtggagggggaaatagatcaacagacgctgtttaaaacgctgtgcgatcagttgcacgaggaaggctttgttgatgcggcgtttctcgattcggttattgaacgtgaagctattgtcagtacgttattaggcgacgggattgccttgccacacgcgctggggctgctggcgaagaaaacggtggtttatacggtgctcgcgccgcaggggattgcctggggtgacgaaacggcgcacgttatttttttactcgccatcagcaaaagtgaatatgaagaggcgatggccatctacgatattttcgtcactttcctgcgcgaacgcgccatgacgcgcctctgcgcatgtcagaattttacgcaatttaaaacggtcgcgatggagtgcgtgagtcgtttttgagaggcgttatccagaattcgatgtaatgcgaatgtaatgctaaactgcattacacattcgattctactggaggcataatggccacgctgaacgtccgtctggatgacaaactcaaaaatgaggcttatgccgtgctggaaaaactgaacattactccaacggaagccgtgcgattactgttccagtacgtcgcggaaacggggcgcatgccagtgaaaaccgtcactcttagcgacagtgaagatgcattgattcagacagttcgggagaggctgtctagtccgcaaaagggaatcaaggttagtctggatgacttatgaactggaattcgacccgagggccttaaaagagtggcataagctgggcgatacggtgcaggctcagcttaagaaaaagttggctgatgtgctattgaaccccagaatcgactctgcccgtttaaacgatcttcctgactgctataaaattaagcttaaatcgtccggttatcgcttggtgtaccaggttcgggatgacgttgtgattgtgtttgttgtcgcggtcggtaagcgagaacattcagccgtctatcacgatgcaaacaaacggctttagcgatcaacgcaaatgatgcactacctggttgctgctaccgcgccagataagcgccgggtctttcagatcctgcacaaatttgccatcgaccagcacgttgatgagatcgactacctgcatctgtgcggcgttgagttcatcaagcttgtagccggtccacacccagatatctttccccgggcactccgcgtggatgcgttgtaccagtgccaggatatccggtacgttttgcggatgcagcggatcgccgcccgacagcgagatcccctgacggtgaatgcgcgtgtcgttcagatcggcaatgatcttatcttccatctctttggtaaacggctggccggagttcagccgccaggtgcttttgttatagcagccagggcattcatgcacgcaccctgacacaaacagggtgcagcgggtgccggggccgttaacgatgtctacggggtagtattgatggtagcgcatagcgggtgtccagaaagcatgtaggccggataaggtgcttgcaccgcatccggcaacattgtgatgcctgatgacgacgcgattgcgtcttatcaggcctacggtctttgcaaacggagaattaacctatctgcccattgcctaaatgcttcacgcggcgcttcacttcttcctgcttaccggcgttaaacggacgcgcgtccgggctgcctaaataaccgcacacgcggcgggtgaccgagacgcgtgcggcgtcgtggttgccgcatttcgggcaggtgaaacctttactggtacattcgaactcgccggtaaagccgcactcgtagcattcatcgatcggcgtattggtgccgtaatagggtacatgctgatagctgtaatcccagacatcttccagcgctttcaggttgtgctgaatgttcgggtattcgccgtagcaaatgaaacccccgttcgccagcggcggatacggcgcttcgaaatcgattttgtcgtacgggttgaccttcttctccacgtcgaggtggaagctgttggtgtagtaacctttatcggttacgcccggcaccacgccgaactcggcggtatccagacggcagaagcggtcacagaggttttcacttggcgtgctgtacagactaaagccgtagccggtctcgtctttccactgatccacggcctggcgcagacgctccacaatcgcgatgcctttagcgcgaagttgctcgctgtcgtacaggtgttcgccgccgaacagcgcgttaatggtttcatggataccaatgtagcccagagagatggacgcacgaccatttttaaagatttcagacacgtcgtcgtccgctttcagccgcacgccgcaggcgccttccatatacaggataggcgcgacgcgggctttcacgccttcaaggcgggcgatacgggtcatcagcgccttccgcgccagcgccagacgttcatccagcagtttccagaatgcggtttcgtcgccttttgcttccagcgcgatgcgcggcaggttaaggctaatcacgcccaggttgttacgcccgtcgtggatctgttcgccgttttcgttctcccacacgccgaggaagctgcggcagcccattggcgttttgaacgaaccggtgactttgaccacctgatcgtagttgagaatgtccggatacatgcgcttgctcgcgcactccagcgccagttgtttaatgtcgtagttcggatcgccaaacttgtggttcaaaccatcgcggatagcgaagaccagtttcgggaacacggcggttttgcgatttttacccagaccggcgatacggttacgcaaaatagacgcctggatcagacgcgactcccaactggtgccgaggccaaaaccaaaggtcacgaaaggcgtctggccgttagcggtgtgcagcgtgttaacttcgtattccagcgactggaaggcgtcgtagcactctttttcggtgcgagaacgcgcatatccttcggcatcaggaatctgccactcatcggcggttttgcggtgcttgttatagctttcggtgacaaacggcgccagcacttcgtcgatacggttaatggtggtgccgccataaatatggctggcgacctgcgcgataatctgcgcggtaacggcagtggcggtagagatagattttggcggttcgatctcggcgttacccatcttaaagccctgggtcaacatgcctttcaggtcgatcaacatacagttgaacatcgggaagaacggcgaatagtcgagatcgtgatagtggatatcgccgcgctcatgcgcttgtactacgtcacgcggcaataggtgctggcgggcatagtgtttggcgacaatcccggccagcaaatcgcgctgggtgggaatgactttactgtctttgttggcgttttcattgagcaacgcggagttggtttgctctaccaggccgcgaatttcctggttcagacgaccacgcttttcacgctgaatgtcgcgatcgtgacggtattcgatgtaggcgcgggcaagctgtttgtacgggccggacatcagttggttttcaaccgcagtttggatctcgttaatatccacctgactgcgcgcgttcatttggctgctaacgacttctgcgacggtggcacagtaatctgcgtcatcgactcccgctgctttagctgcacgtagaatggcttccttaatgcgctctgatttgaatggcactttacagccatctcgtttcatcacatgcggtgtcatgatcactccatatttgtaagaacaggttatccacagaggctggggaagccataacaggtttattcatctcttttccaacgacttcccgcaatcctgacccaggttatccacaattcaccttgtgtcgagtgaacaggtgttgtagcaattgtagtcaattaatacaacatattgggtcggcgtgcattttaaagtctatatgtagtgatttgcatcaaggatgtttgcaattttattgatgtagaacaaggtaaaaatcagagcgtacagatggcgggcgctgtagcgtttgtaaaagatagcaagaaaaatctgattaattattcaacaaaaacagacagtaacctggagcaacgccacagcccgtgtcaataggtttgtggcgtttatccgtataaggacgtcgcgttagcgttgtaaccaccagatggcttcaaatgggcggagcgtcatcgcggctggctggctggtgacctcgccataattgtgcagtagcgcctgccactgtcctttgatatgcggtggatgccactcctgacactggttactcagattggcgacaaccagcaggatttgcccctgccactggcggcgataacaccatactgatgggctatccgggaggagatcctgataatcgccccagatcagtacaggctgggttttacgtagcgcaatcagcttttgataggtgtaaaacaccgagttttcatcgcgtaatgccgccgcgacattaacctccgtatagttatcgcacaggcttatccacggctcgccctgggtgaaaccggcgtttttaccgttgtcccactgcatcggcgtgcggctgttgtcgcgggatttactggccaggatagccagtagttcgtcggggtcgcgtccggcggcgcgtagcgcggcaaacatgttatggctttccacgtcgcgataatcggtgatgcgggtaaagtgtgggttggtcatgccgatttcttcgccctgatagatataaggcgtcccttgcataccgtgcagcgccatcgccagcattttcgcggctggaacccggtattcaccctcgtcgccaaagcgggaaacgatgcgcggctgatcgtgattacaccagaataacgcgttccaggcgacgttatgcatcccctgttgccagtggcggaacaacgctttcagcgccacataatcaggttttgccagcgtccacttttcgccattggggtaatccaccttcagatgatgaaaattgaaggtcatcgagagttcgtcgccgctaagcgcggcatattgctggcagttttccagcgtggtagaggacatttcgcctaccgtcatcagattacgcggcgtaaaaacgtcacggttcatttcgcgtaaaaacgtatgcgcgcgcggtccgtcggtataaaagcggcgtccgtcgcccgtcggatcgtcaggaaaatcctgatctttggcgatcaggttcaccacgtccagacgcaggccatccacgccgcgatcggcccagaattcgcagacctttttcagctcggcgcgcacggcgggattttcccagttcaggtcggcctgttcaggcgcgaaaaggtgtaaataatattgttcgctctggctatgccagcgccaggcgctgccgccaaatttggattgccagttattcgggcagacatccggcgtgccatcgcgccagatataaaactgacggtatggactctctttgttcagcgcttcgcgaaaccaggcgtgctgggtagaagtatggttaaacaccatatccaggatgatacgaataccgcgtgctttcgcctgcgcgaccagctcgtcaaaatcatccagcgtgccgtaggtcgggtcgatagccgtataatttgcgacgtcataaccgttatccacctgtggcgagatataaaacggcgtgagccagatggcatctacgccgagtcgctgtagatagtcaaggcgctgcgtcacgccgcgtaaatcgccggtgccgctgccggtcgtgtcctgaaaacttttcgggtagatctgataaataacgccgttttgccaccagaggggaatagtcattgttgtttcctgcaagtgcgttgggacgcaactgcgccccgaagaagaattagacaatttgtaatgtgccctgacgatgcttacgctgatagataaaggtggtcagaatcaccgggatcacgatcgcgataaccatcgccatgctgtacacctgccagtagcgcggcggtatagacaggatgcccggcaggccgcccacgccgataccgttggcgatgacgccgttcagaccgcagagcagtcccgccagaccagatccgatcatcgcgcacagcatcggaaaacgatacttcaggttgataccgtacatcgccggttcggttaccccaaggtaagcggaaatggcggcaggaacggagatctcgcgttcattgtgtttacggctggagatgatgatgcccaccacggcggaggcctgcgcgatattcgacagcgcaatcagcggccagactggcgtaccgcccatgctctggatcatctgcatatcgatagcgagcgttgtctggtggacgccggtaatgaccaacggggcatacaggaagccgaacagcgccgcgcctatcggggcgaaactgccggtcatcagataacgtaccgcaaaggccacgccgtcgccgatcatacgaccaaaggggccgataaaggtgtgggcgagaaagacggccagtatcaacgaacacaccgggacgacgaccaggtagagataatccggcacgatgcgtttcaaccgcgtttcaataaacccaagcgccagccctgccagtagcgccgggataacctgcgcctggtagcccactttctcaatgctaaataagccgaagttccagacgtccggcgtttgctggcccagcagatacgcattcatcaactgcggcgacaccagtgtcacgccgagcacgataccaagaatcggcgtgccgcccatttttttcaccgccgaccagcagatccccaccggcagatagaaaaagatcgcttcgccgatcaaccataaaaaatcataaagcgtttttagcgccggatgcatctgcgccagcgtttggccgttgctcatcggcacatcgccgatcacgttacgaaagcctaagatcaaaccgccgctgatcaacgccggtagtagcggaaagaagatctccgcaaagtgggaaattaactgctcatgccatttcatgttctggcgagcggcttttttggcctgctctttatcagcatacgctttgccggtggtctccagcagcgcgttatagtaatcgccaacgtcggtgccaatcaccacctgaaactgaccagcgttggtgaaacaacctttaaccatcggtaattgttcgatcttttttggcctggcgttcgcgggctggtggagcacaaagcgcaggcgagtaatgcagcggctcaccgtggcgatgttgtcgcgcccgccgaccaggtcaatcagccggtcgatatcggcttgttttactttgctcatcgtaaagcctcatggcagaggaggtaagttatgggttggcgcaagagtagctcttcaacgttggtttaaaaatgggaacgttcccgaaacgcagcgacgatcacaaattactcgtggtattccgtttaatcagtcactcaggcgagggtagaaggaatgacgatccggcgcggatcgcagcggccattgatctgttcgatcagctgcgaagccgcctgccgtccggcttcagcatagccaggatcgacagtgacgatctccgggtgcaggaattttatcagcggcgtgttcccgacgcttgccagttgcagcgtctcaatacgttgctcctgtaaatacttactggcgcccaacgccagcgtatcggtggcgcagactaacgcggtggtatccggcatgatgacacttgccgtatgctcatagccctgcttcatggcaagaccgggcagggcggcgacgggatgaagtttatgttttttgcaaaacgccaggtatgcgtcatgccgacgtttgccggtggtaatatcgctatggggaacgcccagaaagctaatgttgcggtgtccctgctcatacagccgctgcataaggatatgaatcgcgccctcgtcgtcgtaacagacggaggcaaaaccttgcgcatctcttgccagcagcaccagcgaggctttccagggggcgatcagctcttctgtgatgccggtaaagccaaacagcaccacgccatcaatgttacgtcgtctgagcatgcccagatgttccattaccagcgtcggcgagaactgactttccatcataatagggtcgtagccctgttcataaaacgcaggcagcatggtctgaaccgcgaggttttcagacaacgaatcaaggcgagtgacgataatagcgaccactttatcgctttgtccccgcatcgcgcgggcggagcgggacggggagaaaccgtgttgattcatcaccgcttcgacacgctcgcgggtacgttcgcttacgccgctttcattgttaagcacgcgggaaacggttgatttccctacgccgctcaggcgggcgatgtctttgatagtgagccggttttgcatcctgttttcccgtggcgtgacgctgatggtgataaaaagagtaactttactcaagcgaagggcaatgggcaaagtctggtttatcgttggtttaattacgtaacggtatgataccgccataattgccacaaaacttatggatttatgcgtataatccgcggcgcaaattatttacttaccggaggcgacatggaccctgaacccacccctctcccgcgatggagaattttccttttccggtaagcctgcctctgctgtcttaccggtgtgtaagacagtgacacaataacgtccctgtttttatttaaacattgctcatcgggcaaggctttgccgtgcctgaagaattttctgcgcctgacttcggcgcggagggattacctatgctaaaaaccattacccgccagctttttgcccggcttaatcgtcatttgccttatcgtctggttcaccgcgatccgctgcccggcgcgcagaccgcggtaaatgcgactatcccgccttcgctgagcgagcgctgtctgaaagtcgcggcaatggagcaggagactctctggcgcgtttttgatacgcacccggagggattaaacgctgccgaggtgacgcgcgcgcgtgaaaagcatggcgaaaaccgccttccggcacagaaaccctcgccgtggtgggtgcatctgtgggtatgttatcgcaatcctttcaacatcttactcacgattcttggcggcatttcttatgccacggaggatctgtttgccgcaggcgttatcgccctgatggtcggtatctcaacgctgctgaattttgtgcaggaagcgcgctcgacaaaagcggcggacgcgctaaaagcgatggtgagcaataccgctaccgtactgcgggttattaatgaaaatggcgaaaacgcctggctggaattacccatcgatcaactggtgcccggcgatattattaagctggcggcgggggatatgatcccggcggatttacggattatccaggcgcgcgatctgtttgtcgcccaggcgtcgctgaccggcgaatctctgccggtcgagaaagtcgccgcgacgcgtgagccccggcaaaataacccgcttgagtgcgacacgctgtgctttatggggacgaacgtcgtgagcggaacggcgcaggccgtggtgatggcgaccggcgccgacacctggtttggtcaattggcggggcgcgtgtcggaacaagataacgagcagaacgctttccagaaaggaattagccgcgtcagtatgttgctgatccgctttatgctggtcatggcgccggtagtactgattattaatggttacacgaaaggtgactggtgggaagcggcgctatttgcgctctcggtcgcggtagggctcaccccggaaatgttgccgatgatcgtcacctccaccctcgcgcgcggggcggtgaagctctcgaaacagaaagttatcgtgaagcaccttgatgcgattcagaacttcggcgcgatggatattctgtgcaccgataaaaccggcacactgacgcaggataaaattgtgctggagaatcatacggatatttctggtaagcccagcgagcatgtactgcattgcgcctggctgaacagccattatcagaccggtctaaaaaatttactggatacggcagtcctggagggagtagacgaaaccgccgcgcgtcagctctccggacgctggcagaaaatcgatgagattccgtttgattttgagcgtcgccggatgtcggtggtggtggccgaagattcgagcgtgcatcaactggtctgcaaaggcgcgttacaggagatcctgaacgtgtgtactcaggtgcgccacaacggcgatattgtgccgctggacgacaatatgctgcgccgggtgaaacgcgttaccgacacgctgaaccgtcaggggctacgcgtggtcgccgtcgcgaccaaatacctgcctgcgcgtgagggcgattaccaacgtatcgatgagtctgacctcattctggaagggtatatcgcttttctcgatccgccgaaagagaccaccgcgccggcgttgaaagcgctgaaggcgagcggaattacggtgaaaattctcaccggcgacagcgagctggtagcggcgaaagtttgccatgaagttgggctggatgcgggcgatgtcattattggcagtgatattgaagggttaagcgacgacgcgctggcggcgctggccgcccgtacgacgttgtttgcgcgtctgacgccgatgcataaagagcgcatcgtcactttactcaaacgcgaggggcatgtggtcggttttatgggcgacgggattaacgatgctccggcgttgcgggcggcggatattggtatctcggtagatggcgcggtggacatcgcccgtgaagcggccgatattatcctgctggaaaagagcctgatggtgctggaagaaggcgtcattgaaggtcgtcgtactttttctaatatgttgaaatatatcaagatgacggccagctcaaatttcggtaacgtgtttagcgtgctggtggcgagtgcctttttgccgttcctgccaatgctgccgctgcacttgctgattcaaaacctgctgtacgatgtatcccaggtggcgattccgtttgataatgtcgatgaagaacaaattcaaaagccgcagcgctggaatccggcggatttggggcgctttatggtctttttcggtccgatcagctcgattttcgacattttgaccttttgtctgatgtggtgggtatttcatgcgaatacgccagaaacgcaaactttgttccagtccggctggtttgtggtgggattactgtcgcaaacgctgattgtgcatatgatccgtacccgccgtctgccgtttattcaaagtcgcgctgcctggccgctgatggcgatgacattgttggtgatggtggtgggagtttcgttgccgttttcgccgctggcgtcttacctgcaattacaggcgctgccgttaagctatttcccgtggctgattgccattctggcgggctatatgacgttaacccagttggtgaaagggttttacagccgacgttatggctggcagtaaacactttcgtcggggattcgccagcgtgcttaatccccgatatcgctaaccaggtcagatgcccgtaaagctcgacaagtttaacgcgatcggctttatctttaaatttcagggcttattcaagcaactgtagaatgctatatgcaggcataaaaaagaggaatgtccagctaagtttgtaaaatacattctctgcccccaatccggaacgagaggaggagatgtcccaccgccggatatgttttgcggatatgcgacgaaagcggcgaatatagctaatgcaataaactaagtaaggaggaatcgctaaggcggcagtgggtttaggaaacataagggtaagcaatatggctgcgacaatgaagcataaaaagactatcttcgcggtagattctatctgttttaattcctggcgtatgctttcagcatgtttctcctgccagcgacggagcgtgctgttgctaaatccatattcttcgcataacgccttattcggtacgccgtttttagactgttgcagaaaatcggcgatttgttcctcggtaaaacgcgctcttaccattgccgcctctccatggctgttggtgccccgaaccgggcaaacttgcgccgcccggcggggatgacgtccggcgcttagcgacgaacagcgatcgcttcaatctcaattttcacgtctttcggcagacgggcaacttccacgcaggaacgcgccgggaaggtcgcgttgtgctcggtgaagaacgcttcgtaggtggcattgacggtcgcgaaatcgttcaggtctttcacgaatacggtcgttttcacaatgtcgcctactttcaggccagcggcttccacgatagctttaacgttttccagcgactgacgtgcctgagcggatacgtcttccgctacggcaccggttttcggatcgaccggaatctgaccggaagtgattaccatgctacccaggtcaacgccctgtacgtatgggccgattgctgctggtgcattttccgtcgcaatagttttgctcatgatttctcctgaattacagcggtaatagaatgtccccgctcattatagggagccaggatctcataaccaacccaaattagttggccagcaccacataatgcgaaaactctttttcacagtatttgcatttgagggcgatatcattggcgcgttttttcactgcaaagctggaggatactggttccgcgtggctgatgcagttgctgttcgggcaaaccagcacattattaatacgctctggcaggctggggcgtgatttcccgactacgtcgtagttgtcgatgcggttaacggtggcctgcggcgcgtacagagcaagttggttaacctgctcttcggtgagaaaggtgttttctattttgattaagtctttacgccccatctcgccagacgggagattcagaccgatagtgattcgctgatcggtctcggtcaatttaaacagactcagcagtttaaagcctacctgcgcagggatatggtcaatcacggtgccgcatttaatggcttcaacctgcagtttgttatcgtgtgtcatcgtttttctcccttacagactcagttcgctattcagtactaacgccagtaacgcctggcgagcgaaaataccgttgcccgcctgttggaagtaccaggcgtgtggcgttttatccacatccgtggtgatttcatcaatccgcggcagcgggtgcagcactttcatattttcacgcgcgccgttcaggtcgctggcgcgcagaacaaactgcgccttcacattggcgtactccgacgggtcgagacgctctttctgtacgcgagtcatatagaggatgtcgacgtcggccatgacctcttcaatagaaccatgcaggctccaggccatccctttttcatcaagcatatccagaatgtactgcggcatcgccagcgcgtccggcgcgataaaataaaaacggttgccgctaaatttcgccagcgcctgggttagcgaatgcacggtgcggccatatttcagatcgccgaccatcgcgatatgcaggttatccagacggccctgcgtttcctggatggtgaacagatccaacagggtttgcgtcggatgctgattcgaaccgtcgcccgcattgagcaccggcacctgaccggaaaactccgtcgccagacgtgccgcgccttcttgcggatggcgcatcacaatcgcgtccacgtaagtgctaatcactgagatcgtgtcggctaacgtttctccttttttccccagcgacgtgttggcgctgtcggagaagcccactacgctggcgcccaggcgatgcattgaagtttcaaacgacaggcgggtacgcgtggaggcttcgaaaaagcagctggcgatcactttatgtttcaaaagctccggctgcgggttggcttttaatttcgccgccgtggccagtaccagattaagatcgtcgcggctgaggtcgtttatggaaatgatatgtttttgatatagcgggttagccatgtttatctcctgacgcctgggcaaaaaaaagcccctcaattgaggggcttggtattggttttcaacggaaagaaaaacggcaggcctgcgtcctttttcagacgcggtaagacagaatgtcgtacacactgaaccatgcttcctcccggcaaattgtccgcgattatactcagctctgtttggggatcaagcgaattaatgcatgatttactcatcgcaaacggttcttatgaatttaaattcattttaagcaaataattaatttgtttgtgtaccagcgccgtacgctgaacgacccgtggtgcgacccagacaatactgctaccggcaacgacgccgagaatttccggcaatgcgtggtaatccagaattctcgcgacggcgcgaccataacctgccgccgtatggataaggataaattcgctattatgttcaacgctgacgaccatttcagctattgaacgtccggcatccggcgaaggacgccgctggggatttacggaataaatcttttgtcccttcgtatttctgatttttattgcgcccagcagcttgagcaggcgcgaaaccgtagactggctgataccttcaaatccctcattttgtaaatcgcggcgaatctcctcctgggacaggtaacttttttcactaatcaggcgctgacaaaccgccagttgctgttgttctttggcggagtaatcatcgtattccttcataaatgcaccttatctttattattaatatcaacggactggcgaaattcatcacatttgtcacatcgattgcggatcaatcgggcggttttgcaggaaaatgagaagccgatcaaaaaaggtgacggcgtgcctgatggcgctgtgcttatcagtcctgtcggataagacgcgtcgccatctggctcgttacatcatcgctccgatgctcagtaccgccatattcagcaatgtcaggatcagcaacagcggcgcgacccatttcagatagcggacatagggaacccgcgcgattgccagaccgcccatgaccacggcggaggtgggagtaaccaggttcacaatcccggaggccgactggtaggcggttacgaccaaatcccgctgtacgtgggcaaaatccgctaacggcgccataatgggcatcgtcaatacggcaagaccggaagaggagggcaccaggaaggagagcaatacttccagccagtaggttacgtttatgaaaatagtggtagagaggccggaaaccagactttccgcgctgtgcaaaatggtgtgggtaatcataccgttatccatgaccaccacaatgccgcgcgcgataccaataattagcgccacgccgagcaaatcccgcgcgccgtcgataaaggtactggtaaacgcttcctcacccatccgcgttatcacgccaacgataatcgccgccgccagaaagacgccggagatttccgccatccaccagccgagaaccgccacgccgtaaatcatcaccgcgaaagaggcggcgaagatcagcagcacccatttccgggtagccgtaaactccagcagtgtattggcgcgattgccgagaaaatgagcgcgattttcctccattttatccgccacgatagaaagctcaggatgggcgcggactttgcgcgcatagcgcattacccaaaacacgcacagtacgtagccgacaattaacagcagtacgcgcatcagcattccctgagtaaaagggatgccggcggcgttggcggcaatgaccgtggcgaaagggttaatggtcgaaccgagcgtgcctatccctgcgccgagcagtacggttgccgccgccactaacggatcgaagcgggccgccatcatgaccggtaccagcagcgtgtagaagggcaacgactcctccgccatgccataaatagtgccgcctgcggcgaacagcgccatcagaatggggatcatccactcatctttgccgttgagtttgatagttacccgttcaataccggcatcaatcgcccccgttttattcaccacccccagaaagccgccgataatcaagacaaacagcgcgacgtcaatggcgccggcggtgtaggtttcgtggttatagaggccgtcaatcggcgccagtaaaacagcggtaatcccttgcggatgcgcgtccacgggggcatacgttcccgccaccggcacctcttttcccagcgtggcgttcatcgccatttggtattttcccgccggcacaatccaggtcatcaccgcgaccagggcaataagaataaacaggatggtataagcggtgggaaatttaaatttacccatgatgttctctcctgatatcacggatatgcgccgcgagggcgcatatcctgtgggattagtcgccgagcgtcgccaccatgactgctttgatggtgtgcatccggttttccgcttcatcgaagactatcgagcctgcggactcgaacacctcttccgtgacctccagtcctttcaggccgtaagccatttcgatttcgcgtcccactttggtgtgctcgttatggaaggcgggcaggcagtgcataaacttcacatcaggattaccggtagcgtttaccacctgctggttgacctgatatggcgtcatcagactgacgcgctccgcccaggcttctttgggttctcccatcgagacccagacgtcggtatagaggaaatccacaccgtgaacgccgtcttcaacgctctccgttaaggtgatacgagcgccggtaacgctggcgatttcccggcactgcgcgaccagcgcggcatcaggccagaaggactttggcgctatcaggcggatatccatgcccatcttcgccgcgcccaccatcagcgagttgcccatgttgttgcgcgcgtcgcccaggtaggcgaagctcagttccggcagcgttttgcccggcgcatgttccagcatggtcatcagatcggccaggatctgtgtggggtgaaattcatcggtcaggccgttccagacgggaacgcccgcgtattcccccagctcttccacaatgtgttgaccaaatccgcgatattcgatgccgtcatacatccgccctaggacgcgagcagtatctttcatggactctttatggccgatctgcgagccgcttgggccgagataagtcacctgcgcgccctggtcgaacgcggcgacttcaaacgcgcatcgggtgcgggtagaggttttttcaaaaatcagcgcgatgtttttgccgatcagtgtttgcttttcgcatccggctttttttgcggctttcagctcaatagccagatcgatgaggtgttggatttccgccggggtgtagtcaagcagcttcaaaaagttacgatttttcagtgaaataaccattacaatatccttgttaaaatgaattgcctgatggcgctgcgcttatccggcccacggttatgcgcgctctgtaggccgaataaggcggaagccgccatccggtaaaaagccttatgcgtcaacgtcggcggtttcacaccgaatcaaagtacctttctcgcccgcgagaatggcttgcccatccgccagcgagccgattccggcaatgccgcggcaatggctgacaaactcagcgcaggcggtcactttcgggcccatcgaaccggcgtcgaactgcatttcacgaagcagctccggcgtaacctgcgccagcgggcgttgggtgggtttgccccagtcgagatacaccgcgtcggcatcggtcagaatgagcagcgcgtcggcgtgaatttggctggcaagcagggcggcggacagatctttgtcgatcaccgcctcgataccgtggtagccatcggctttttccactaccggcacgccgccgccgccgttacagataaccaggtgatcgcggctaatcagtgcgcggatggcatcgttttccacaatgcgtttcggctgcggggagggcacaacgcggcggaaggcgttaccgtcggctttgaatacccagcccttttctgcctgtaacgcacgggcctgcgcttcgtcgtaaatggggccgatatatttggttggattgaggaatgccgggtcgttggcatcgacttcgacctgggtgagcaggacgctgatttcacgctccggcagatgattcttcagcgcctgttgcagcatgtagccaatcatgccctggctttccgcaccgagaatatcgagcgggtagggcgtaacgttagcgtaggcgctattttgtagcgccagcagtcctacctgtgggccgttgccgtgcactaacaccacgcgccattgccgcgtaagctgggcgatggttctggccgccagttcgatatttttacgctgaatatcagcctccagcggttcgccgcgtttgagcagcgcattgccgcccagcgcgacgaccagtgtgcgtttgttttccataacgtctcctttaaataccatcgcgttccagtggacagctcatgcagcgtgcgcccccgcgcccgcgacccagttcatcgccgggaatgggaaggacggtaatgccggctttgtcgtatttttcgttggtccagatgttgcgctcatagcccaccaccacgccgggacgcagggtgagcacgttattggcgtcattccactgttcgcgctcagcttcaaatgcgtcgccgccagtggtgattaagcgcacctgatcgatgccaagcgctttttcaagagcatgaaccagcgtgctctcctgggttcgtttcagaccgccgcgtccgtctggcgtcagcgtccagcactgaacgtccgggcgaacgacttccggatagacggagaaggtgtcgatatcaatgtgggtcatgacggtgtcaaggtgcatgcaggagcgatgttttggcagttcaacggcaatgacgcgttccgcctgacgatgtttaaacaatgcctgcgccaggaactcgacgccctgcggcgtagtacgttcagacataccgatcaacaccgcgccgcggccaatcaccagcacatcgccgccctctaaagtggcgtggtcgtaattaatgtcctcgtcgccgaaatatttaatgaaatcaccgcctgcgaattgaggatgccagcgataaatagcacgtaaattattcgtttcacgttggcgtgcaggtttcgccatggggttaattgagacgccgttatatatccagcaggacgtgtcacgggtaaataggtgattcggtaatggcttcataataaagtcattaatatcgtgagtatcgaccaccatattttttatggaggcgggaatttcgccgtaagttaaaccgccgcttaaatggcgagccagttcacggtgcggcatatccgccagccaggcgcgaatatctgcggcaaaggtgggcccaaggcgataatcggaaatttgcgtatccagtagccaggctttagcgtcagccacatccagcgtttgggtgagcaggtcggttaacagcaacacttctatcccttgctggcgcagcgtgttggcaaaaatgtcatgctcttcgccagcgcgctctacggataatacatcgtcaaaaagtaattcctgacaatttgaaggggtaagtctttttaggctgagattgggccgatgcaacattacgctgcgtaattgaccgatttcagaaccgacaaaatgcttttccatcattataccttttacataatttcaagaataaagaaggagtggctgcaaatatttagcgtgcttgcagtcgcggcgtttcagttaaattcgggagcaatgattgaattttatttgggttgttaatgtgatgagattcacatcaatcaaggagtgctatttttcttacttaatatatgagccgggtcagagaaattcaaaaaacaataaggcattaaatgaattactacgcagctatatggtttgttatttttttattgttaattatttgtttgttgtattgaatgatatttaaatcttaactcattgaaaataaaatgattatttttaatggttgcataactatgcgtgagggggattttattatcggggatatttaaataatttaaaaataactatggatagagaagtcatttatgcagggagagcgaattgtgatcgctaaaacgtttttatgttaacgcctttaatatcaaagcgttgttagtgatggcaatttggcgccgctggggtttatgcataggtactgcataaagttgggcgaactattaacaatatagaaacaccgctggcgataaacatgcgctggcgcaaaatcgatgagagtaagggtagtatggcagccatttttctcgtataaagagaaatataaaacgctgttttaactaaggggatgcgatgattattggcaatattgaatatctggaggcctggctgccgacggcgttacggcaggcgattgagcacgtcaatgcgcatgtcacggcaacgaccgcgccaggtaagtatgacattgacggcgacaggctgttttatatgatttctgaaaatatgacggagccgggcgaatcgcgcagcgcagagtatcacgcccgttatcttgatattcagattgtgctacaaggtcaggaagggatggcattcagtacccggcctgcgggaacgccgcacacggactggctggcggataaagacattgcatttttaccgacgagcgtcgacgagaaaaccgtcgtcctgaacgaaggcgactttgtggtgttttatcccggcgaagtgcataagcccctgtgcgcggtgggagaaccggcgcgggtacgtaaagcggttgtgaaaatgctgatggcgtaatattttgtgccggatggcggcgcctgcacgttgcgatcttgtaggccaaccgccatccggcatcatcacgacattatttagacagcgtcgctaccattactgctttgatggtatgcatgcggttttccgcttcatcaaagacaatgctggccgcagactcaaaaacctcgtcggtcacctccatcccgccatgtaaaccgtactcttcggccatttttttgccgagcgtggtttcgtcatcatggaacgcaggcagacaatgcaggaacttaacctgcggattgccggttaacgccatcatctggctgttgacctgataatcacgcagcagggcaatacgctccgcccatttctctttgggttcgcccatagagacccaaacatcggtatagataaaatccgcgccttttacgcctgaggcgatatcttcggtcagggtgatggcgccgccgttctttttcgccatggcgctgcactccgccactaacgcggcttgcggccagcaggcttttggcgcgaccagacggagatccaatcctgttaacgcggcggcttccagcatggagttacccatgttattacgcgcgtctccggcatagaccaacgtcatctcgttaaaggctttacccggcagatgttcctgcatggtgagcagatccgccagtaattgcgttgggtgatactcatcggttaaaccgttccataccggcacaccggaatattcagccagcgtttcgacgatctcctggccatatcctcgatactgaataccgtcaaacatccggcccaggacgcgggcagtatctttgatggactctttatggccgatctggctcccgctggaacccaggtacgtcacgcgcgccccctgatcgtatgcggcaacttcgaaagagcatcgtgtccgggtcgagtctttttcgaagatgagcgcaatattcttacccaccagcttttgttcttctttaccgtttttcttatcggctttcagtttggcggcaagctgcaacagagcagtgagctcgctggcggtgaaatcaagtaactttaaaaaaggtttttggtaaaacgtagacatacttccctcacatggcttaggcctctcattgaattaaaattcactttatatggatgattattcatttgcaaccctgtttgataaaacttttctcgataaggtggaggcaacgtcggcggtatgtgacaataagagtatcggcaggacatctatgaggaacgagctatggcaaacccggaattactggaagagcagcgtgaagaaacgcgcttaattattgaagagttacttgaggacggcagcgatccggatgcgctgtacactatcgagcatcacctttccgctgacgatttcgaaacgttggaaaaagccgcggtagaagcctttaaactcggctatgaagtgacggagccggaagagctggaagtggaagagggcgatacggttatttgttgcgacatcctcagcgagtgcgcgttgaacgccgaactcatcgacgctcaggttgagcaactgatgaacctggcggaaaaatatgatgtcgaatacgacggctggggaacctattttgaagaccctaatggcgaagagggtgatgacgacgattatgtcgatgaagatgacgacggcgtgcgtcactaaagctgcatagtatgacggtacggcagcgtctgctgtcgtatttttttaacaggttacgtatgaattacccgcaaatactctctccggtgcttaatttcctgcattgcccgacgccgcaggcgtggattgtccaggcccgcgatccgcaaaatcttcctcttctgcttaccgatcacctgatctgcgaactgaaggctgcgcaaaccgcgttgctgttggtgcgtaaatatgtcgccgataaatcgggcgccgacgcgctgctctcctggctgcaaccttacgaggcgttcgcgtttcgtcaggggccggagccggattttgttgccctgcataaacagattagcaaaagcgccatgccgcaaactgatgacccctggggacgtcagcttatcgaccgtatggtgttattgattaaagaggagttgcaccatttttggcaggtacgcgaggtcatgcaggccagaaacattccttatgtgaaaatcaccgccagccgctacgcgaaaggaatgttgaaagcggtacgcacgcacgaaccgctcaccttaattgataagctgatttgcggggcgtatatcgaagcccgctcctgcgaacgttttgccgctctggcgccctggctggatgaggatttacagacgttttatctctcgcttctgcgctccgaagcgcggcattatcaggattacctggcgctggcgcagcagatttccgccgaggacatttctgcgcgcgtgcgctattttggcgaggtggaagctgaccttatcttgtcgccagaccgcgagtttcgttttcatagcggcgtgccagccgccggataaagggtaaaattaaagattagcgtttttatcttttacgctgttgccacctgcgtggtcatccgcccggcatcaaactgctggcgagcaggaaaagtcattttcatgatattctgtcctgagtaaagcctgccctgaggcaggcaaaaagaactcactcagtgttatattcccgaaaggttaccgtgaacaatgccctttttgcatcatcactacgggttcttgtgttgaaatacttactgtttcacgccttttgacgcttcagagcaggtcttgccaacaaaggtttgtttaattttgttgatggaggttgttttattacctcctgcatcgacatccgatttcatggtcatcgcaaattctgtatcgcttattttcgtcgtttctacaatagagtgcgatttgacatcaggattattacagacagtctcattgatcagtttggtatccgtactttctacaaatgttgtcgtgcaaccgcctgcactggtagaaaaacccttcaccatttttttagaatcttcagacattttaggggtataacacataagcgtcgctatgcccgaattttttttcatccattaatacttcttttgtatctggattgatggtgcgcatttctatattttccattttccattcgccgggctgtatatctaatgcatatacattagagatactaataaacatagcggggaaaacaattgctgataataggcgtttcatttataacttccttgaataataagtgattcccggataacaggatgtttccgggattacttatatcagcaaaaataatacctggcgaggataaataaacgcctggttttcagagatcctttaacatcctcacttcgcaatcgacatgtccggtgcaaccgagcggttcgctaatatgttcaaatcctaaacgttcgtatagcgcaatcgcctcgcgtaaaaaagccgttgtttccagatagcagcgtttaaaaccctgttcacgggcatgatccagcgccatcagcgccagctttttcgctagtccctgaccacgaatcaccggtaaaaaatacattttttgcagttcacaaatgtctggttcgctacaggataacggcgccacgccgccgccgcccaccacacaaccgttttgctctaccacccagtaggccgcgcccggttggctataaacctgatacagttcatccagattggggtcggcaacggtataacctttatcggcggtaagtccgtattccgctgaaacctgacggatgacacgggcaatagcggcattgtcagcggtagtgattcggcgcaccgtgagcgttggcgaggcgacattattcataatatggctcaatttttaaaatttatttatagattactttaataccaccgtcttgagttacgcgcaaggagatcctgaatcagacaaaataaaaggcggaaaaattaaacaaaaatagtatcgtagtcaaatcagtaacaatttactggtttttattattaattctaatagattgtaattcagggatatgattcatgaataacgttatcagtagtaaagataaccataatcacacgttggtgtttacaggcaagggcggaaagtattttgttatttgccttgtgaatttcttgttgacgtgtatcacgttgggaatctatgcgccgtgggcgatggtgaaatgtcgacgttatatttatactaatatgacgctaaacaatcagccttttgcttacaaagccacgggcggcgcattatttattagtgtgttgttagtttttattatttatattgttagcctctctcttattgaacacggtcatcccggtctcggttttacgctattcggcttattaattgcgattattccttttatggcggtgaaaggattacagtatcaggcgatgatgacttcgcttaatggcgtacattttggattccagtgttccatgcggcgcgcctggtggtacatgttcgctcttcctgtactcctgatggtggcgctttatattgttctttatattatctcactggtaaccatcgccgtcggcggtttagtgttcagtatcgtttttctcggtttgctggctattattgggataggggtcattaacggtattacctacagcaaatggatgaccttgtttggtaatggcgcaaactttggcattcatcgtttctcgattcaggttaatgttaaaacgtgcatcagagggtgcgtgttggcaatgttgacccttttcccttttgctgtcgtgattggttatctaatcgcgccggtgttcaccgacatgattcttttgagtatgatggggaatgcgcaggcaggaggggcgcttattctgcaatattatggccagataatggcatgttatttcctctattttctcgcgattattgtggtaaccagttacttatatgtggcgttacgcaacctgtttttaaacaatttgtcactggcgaacgattcgattcgttttcattcctctgtcactgcacacggtatgctgtggcggttactggtggtgtttgtgatttccggcgtgaccttagggctggcttatccgtggttgaaaatttggctggtgagctggctggcgcagaatacacaggtccagggcgatctggattcgcttgagttaaccaatgatgagaagccgctggaaaacagcccgctaatgtggatttctcgtggcatcatgccttacttcccgtttatctgatgtaaaaaggccgacgtttacgtcggcccataattcatgttgtcggatggcggcgtgaatgccttatccggcctaccgatcgcgccatgtcaataagcgaacgtgtaggcctggtaagcgaagcgccatcaggctttcagattacagcgcgctaataactgcctgctgctcaatcagcttcgctttggcttctgcataaccttccagcttctcacgctctttggcaatcaccgcttccggcgcacgggcgacgaaaccttcgttggacagtttgccttcgatacgggcaatctcgccttcgattttcgccacttctttcgccagacgcgccagctcatcgtctttgttgatgaggcctgccatcgggatcagcagttcggcgccgtcgatgattttggtcacggaaaccgggcctttgtcatcggctggcagcacggtgatgctttccagacgcgccagggtttgcaggaagctacggttgtcgttaacacgacgaacggcttcttcactacagccgcgcagcagcagttccagcggtttgcccggggcgatgttcatttccgcacgaatgttacgtactgcgacgatcgcctgcttcagccactcggtatcggccaacgcggcttcatccacctgtgcggcgttatattccgggaacggctgcagcatgatggtgtcggcggtaataccgcaaatgaccttcacgcgctgccagatggtttcggtgatgaacgggatgatcgggtgcgccaggcgcagcagaccttccagtacggtgaccagcgtatggcgggtgccgcgcagttcagactcggaacccccggtcattaccggcttggtcagctccagataccagtcgcagaactggttccaggtgaattcatacagaatgcccgcggcgatgtcgaagcggaagttatccagtgcttcgcggtaggctttaacggtctggttgaattccgccaggatccagcggtccgccagcgacagcgtcatttcgccgccgttgaagccgcaatcctgctcttcggtgttcatcagcacaaagcggctggcgttccacagcttgttacagaagttacggtaaccttccagacgcttcatatcccagttgatgtcgcgaccggtagaagccagcgccgccagggtaaagcgcagggcgtcggtgccgtgcggctcaatgccgttcgggaactgcttctcggtacgcttgcgaattttctccgccatctgcggctgcatcatattgccggtgcgtttttccagcagttccggcagggagatgccgtcgaccatatccagcgggtcgataacgttacccttggatttggacatcttctggccttcgtcgtcgcgaatcagaccggtcatgtagacggtatggaacggcacctgcggcttgccgttttcatctttgatgaagtgcatggtcatcatgatcatgcgggcaatccagaagaagatgatgtcgaagccggaaaccatcacgctggtcgggtggaactgacgcagggcgtcggtgttttccggccagccgagggtagagaaagtccacagcgcggaggagaaccaggtatcgagaacgtcttcgtcctgacgaagctgaatgtcggcgccgaggttattttcctgacgcacttcgtcttcggtacggccaacgtagacgttgccgtcgttgtcataccatgccgggatacggtgaccccaccacagctgacgagagatacaccagtcctgaatatcgcgcatccaggagaagtacatgttttcgtactgcttcggcacgaactgaatgtcgccgttttcaaccgcttccaccgccggtttcgccagcacgtctgcacggacgtaccactggtcggtcagcatcggttcgataaccacgccgccacggtcgccgtaagggacagtcagatcgtgcggtttaatttcttccagcaggcccagcgcgtcaacggcagcaacgactgctttacgggcagcaaagcgttccagcttctggaactcagccggaatctcgctggaataaacgtcagactcttcacctttggtatcgaacacttccgcgctttcgcggatgtcgccgtcaaaggtcaggatgttgatcatcggcagggcatgacgtttcccgacctcatagtcgttaaagtcgtgcgccggggtgatcttcacgcagccagtgcctttttccatatcggcatgttcgtcgccaacgattggaatgcggcggttaaccagcggcagaataacgaatttgccaatcagatctttataacgcggatcttccgggttcacggccacgccagtatcgcccagtacggtttccggacgggtggtggcgacgaccaggtaatctttaccgtctgcggttttcgcgccgtcggccagcggatagcggatgtgccacatggagcctttggactcgcgattttccacttccaggtcagagatggcggtgcgcagcttcgggtcccagttcaccaggcgtttgccgcggtaaatcaggtcttctttgtacaggcggacaaagacttctttcacggcattggaaagaccttcgtccatggtgaagcgctcgcgctcccagtcaacggagttgccgagacggcgcatctgacgggtaatggtgccgccggattccgctttccattgccagattttgtcgataaacgcatcgcggccgtagtcgtgacgggttttaccttcttcagcggcaatcttacgctcaaccaccatctgggtggcgatcccggcgtgatcggtgccgacctgccacagggtgtttttaccctgcatacgctggtaacggatcatggtatccatgatggtttgctggaaagcatgtcccatatgcaaactgccggtgacgttcggcggcgggatcatgatgcagaaggactctttgctttcgtcgccgttaggcttgaaatagccctgcttttcccagtgctcgtaaagcggctgttcgatatcttgggggttatatgtcttttccattatttccaggttgccgtattcaggttaaaaccagccacgcggtaggctttgtagcgttcgcgcgccagttgtttcaaagtttcttcgtaagggacgaagtctaccacttctgtgaaagcggtggcaaaatctgcaaagcttgtacgcaggctgattaaaatatcgcgcgggctgctgttgcgtttttgcggccaggcgatttcaaccggcgcgccgccgcgtgggccttcgcctgccagattgtgcgggacaaaactttccgccggtcttgcccacagcgcttcatccagccgaatggcctgcttctcatcttcgcaggcgatcagcacgcgcttgcccgcgcgccaacgttctgcggcaatttcacacaccagttgttcaacggcgcttaaaccgttgacggtggtgtcattatccagaagatagaacgtcgcatttttcatatatggggcttcttgtggtggatttaaatgcgttgtcatgatgcctcccgtaggccggataagcgcagcgccatccggcaaaacgcctgatggcggcgctaatgcgccttatcaggcctacggggtaatctcaaacttactcttcgccgttaaagcccgcacgattgagcaggaactgcgacagcagcgctaccggacgacccgtcgcgcctttcgctttgccggaacgccaggcggtaccggcgatatccaggtgcgcccagttgtacttacgggtaaagcgcgacaggaagcagcccgcggtgatagcgccgccaggacgaccaccaatgttcgccatatccgcaaagttggactccagttgttcctggaactcatcgcccagcggcagacgccacgcgcggtcgcccgcttgctcggacgcgccgatcagttcatgcgccagcgggttatggttcgacatcagaccggtaatgtgatggcccagcgcaatcacgcaggcgccggttagcgtcgcgacgtcaatgacggcttccggttcgaagcgctcaacgtaggtcagcacgtcgcacagtaccagacggccttcagcatcggtattcagcacttcaaccgtctgaccggacatggtggtcagtacgtcgcccggacgatacgcgcgtccgcccggcatgttttcacagcccgccagtacgccgataacgttaatcggtagctgaagctcggcgaccatacgcatcacgccgtaaaccgccgccgcgccgcacatgtcgtacttcatctcgtccatcccttcagatggcttgatggagatgccgccggagtcgaaggtcaggcccttacccaccagcacgatcggacgcgcgtcttcggacggattgcccttgtactcaatcaccgacatcagcgattcattctgcgaaccgtggccgaccgccagataagcgttcatacccagttcgcgcatttgctgttcgccgatcacgcgggtgatgacatttttgctgtagctgtcggccaactggcgcgcctgtgacgccaggtaggcggcgttacagatattgggcggcatgttgccgagatctttcgcagccttaatcccggcggcgatggccagaccgtgctgaatggcgcgttcgccgctggtgagctcacggcgggtcggcacattaaagaccatcttacgtagcgggcggcgcggctcgctcttgttggtcttgagttgatcaaagctataaagcgtctctttggccgtttcgacggcctgacgcactttccagtagttgttgcggcctttaacgtgcagttcggtcaggaaacagacggcttccatcgaaccagtatcattcagagtatttatcgttttctgaataacctgcttatactgacgttcatcaagctcgcgctctttgccgcaaccaatgaggaggattcgctcggaaagaacgttaggaacatggtgcagcaacagagtctgccccggttttccttccagttcgccgcgacgcagcaatgcgctgatgtatccgtcgctaattttgtcgagctgttctgcaatcggagaaaggcgacgcggttcaaagacgcccacgacaatgcaggcactccgctgtttctccgggctaccgctttttacactgaactccatgcactatgctcctgaatcttaaagacaacagtggtggctacagctatactcgtcgtctttcaagttgcagatgcgttggctgcgcctgctcgcccctgtcgcttacctgatgtaagctccggggcttcacagtcttgccgcctgcctgcaactcgaaatccattagagtatagaaattgaaagctttcgtaactcatgtccgctgttgcggtgacttcgtgttaatcttaacgttattacggcattggcacgtcagaacaagttctgagaggtgaatccgctgagtataatgatcttagcgatgatttcgacgactcaagagaataaatgacgtttaagccatgaaacaagctaaattccagcaaaaaaatgggtttttacgggcgtatttaaagtgataatcataagatatctggtgcgggagacgctcaaaagccagctggcgatactcttcatcttacttttgatcttcttttgtcaaaagttagtgaggattctcggcgcggcggttgacggcgatattcccgcaaatctggtgctctcgcttctggggctgggcgtaccggaaatggcgcagctcatcctgcctttaagcctgttcctggggctgctgatgacgctgggcaaactgtataccgaaagtgaaattacggtcatgcacgcctgtgggttgagcaaagccgtgctggtaaaggccgccatggtactggcgttatttaccggtatccttgcggcggttaacgtgatgtgggccggcccctggtcgtcaaaacaccaggatgaagtactggcagaggcgaaagcgaaccccggtatggcggcgttggcgcagggacaattccagcaggcgaccaacggcagctcggtgctgttcatcgaaagcgttgacggcagcgacttccacgatgttttcctggcgcaaattcgccctaagggcaatgctcgtccttctgtggtcgtggccgattccggacaccttactcagttgcgcgatggttcccaggttgtcaccttaaacaaagggacgcgttttgaaggaacggcgttgctacgcgattttcgcatcaccgacttccagaactatcaggcaattattggccatcaggccgtggcgctggacccgaacgataccgaccagatggacatgcgcacgttgtggaataccgacaacgatcgcgctcgcgccgagctgcactggcgtatcacgttagtctttaccgtatttatgatggcgctgatggtcgtgccgctcagcgtggtgaatccacgtcaggggcgtgtcttgtctatgttgcccgccatgctgctttatctgctgttcttcctgatccagacctccattaaatcgaatggcggtaaaggcaaactggacccggttatctggatgtgggcggtcaacctgatctatctggcgttggcgattggtttgaacctgtgggatacggtgccggtccgccgcctgcgtgcccgttttctgcgtaaaggagcggtataatgcagccatttggtgtacttgaccgctatatcggtaaaaccatttttaccaccatcatgatgacgttgttcatgctggtgtcgctctccgggatcatcaagtttgtcgatcagctgaaaaaagcggggcagggtaactacgacgcgctgggcgcgggtatgtacaccctgctcagcgtacctaaggatatccagatcttctttcctatggcggcgctgcttggcgcgctgctgggactggggatgctggcgcagcgtagcgaactggtggtgatgcaggcatcgggtttcacccgtatgcaggtggcgctgtcggtgatgaaaacggctatccccctggtgctgttaaccatggcgatcggcgaatgggtcgccccgcagggcgagcagatggcgcgtaactatcgtgcgcaggcgatgtatggcggctcgctgctttccacccagcaaggtctgtgggcgaaagacgggaataactttgtctatattgaacgggtgaagggcgacgaggagctggccggcattagcatttacgctttcaacgatcagcgtcgtttgcagtcggtgcgttacgccgcttcggcaaaattcgacccggagcataaggtctggcgtttgtcgcaggtggatgagtccgatctgcaaaacccgaaacagatcaccggttcgcagacggtgagcggcacctggaaaacgaatctgacgccggataagttaggcgtggtggcgctggacccggatgcgctttccatcagcggtctgcataactacgttaaatatctgaagtcgagcggacaggacgccggacgttatcagctcaatatgtggagtaaaatcttccagccgctctccgtggcggtgatgatgctgatggcgctgtcgtttatctttggaccgctgcgtagtgtgccgatgggcgtgcgcgtggtgacggggattagcttcggcttcgtcttctacgtcctcgaccagatttttggcccgctgacgctggtatatggcattccgccgattgtcggcgcgctgctgccgagcgcgtctttcttcctgattagcctgtggctaatgctgcgtaagtcgtaatcacagtaatcgtaggcctgatggcgctgtgcttttcaggcctactccggacccgtaggccggataagtcctttccgccgccatccggcagacagcctggtattcctcgaatgatgtagcgcgtaacctgacacgtggcgcttttggctacgcgttaagcacaggcaagctgcgggaaagagcataagcgcagtagttcaaaaagttataatgtgttgccgtgataaatctgataacccaaatcaatcgtattatggttgagatcgttatttttaattttgttgagcaacatctgcgcggctctgcgcccgatctcaaaacgaggggtaattacgctggcgaggctcggtatcatttgcctgcccatctccagaccgtggaagccggcgatggagatctgctccggtacggccagttgacgctcgcggcaccacagtagagcgcccattgcgatatcgtcgttagtacaaaagacgccatccacgtccgggtgcgcagtaagcgcatcacgcattagctgtatccccagatggatagaggagatagcgcggggattgatgcgcaacggcgccagcccccggcgcgtcatcgcatcgcagtagccgtgataacgctgctcatctcggatatcgtcttttgaacccagatagaggatttttcgccgctggcgtttatccagcatggtgctgaccatatcaaaggcggcctgacggttatcaaaccccacctccatatctaagcgatcaccctggatgtccatgagttctacaatcggaagggtagctgagcgcaggaatttgacggttctgagggtatgatatttttctgaaagaataatgccgtcgatattgtaagacagtaaattgataacggactcttcttccgaatcgcgattgtaattgtaattcgcaatgagagtttggtagttatgacccgacgttacggattcaatcccggcaagaatgtcggcaaacaactggttctggaaagaggggatcagcacgcccagagtgtaactttgcgcgtttaacagcatagctggcgcgcgatttggtatgtagttaatttcctccatgatctgcgcaatacgctcgccggtttccctggcgacttttttcggcgagcggatgtaacggctcaccgtcatttttgtcacgccagcaagcgtagcgatatcctgcaaagaaattctgtgattcctcatgttttctccagtaccgggggcgggaacgtcgcccccatggttaattgggctgcggatgatgaattaatgcagaaccgcattcagcgccagtacgcccagtaaccccatgacagaaatcaatgtttccataacggtccaggtacgtagggtttccccgacgctaagattaaaataccctttaaacagccaaaaaccgggatcgttaacatgtgatgcaataacgcttcccgcgcctgtcgccagtaccattaacgccggatcggcgtgggttacgttaataatcggcaatacgacgcccgctgtggttatcgcggccacggtcgcggaacctaacgcaatacgcagcacggcggctaccgtccagcacattaataacggagatagcgaggtgccggtcattaattgcgagatatattggcccacgccgctatccaccagcacttgtttaaacgcgccgccgcccgcgatgataaaaacaatcatcgcaatagcgccaatggactcgccgacgatatccatcacctgctcaaccgtacgtccgttgcgtcggcccagcgtaaaaatggcgatgataatggcaataaacaacgccactgctggattaccgataaattcgaagaaaacccgcacggcattcgtttttggcagcgtgatttcacataccgctgcgatggccatcagaatgaccgggatcacggcggcaaaaatactgttccagaatgacggcatctcttcttcactgaatagatgaggattaaataatccttcaggcggcgctttctcaaagcgcgccagcaattttgaaaacagcgggccggcaacaatcacggtcggtatggtaatgattaacccatacagcagggtcgtaccgagatttgcctcaaaaattgtcgcaatagcggtagggccgggatgcggcggcaggaagcagtgcgtaacggataaggcggcgaccattggaaccccgacatacagcaagggcagtcccgatgaggccacaatcgtaaaaacgagcggcaacagcagtacgaatccgacttcaaaaaacattgccaggccgacgataagcccggtgatcaccagcgcccattgcacgcgttttttgccgaacgtattaatgagcgtcgtcgcaatgcgctgcgcggcgccggtatcggaaattaatcttcccagcatcgcgccaaaaccgaggatcatggcgagtccgcccagagtaccgccaattccgttttgtatggagtgcaggacgtcttgcgcgcccatcccttcggcaaatcccaccacggcggcaaccagaacaagggcgataaagccgttaactttaaagccaatcattaagaccaacagcagcgcaacgcctgccgcaataattattaatggcatattcgtctctcttattagcgccaaaatagcagcgcttacgcgctgcgtcgtatttccctggtcagacggcaaccagcataccgccatcgacaaacagcagatgtccgttaacaaagtcggaggcttttgacgagagaaacaccgctgcgccaataagctcctggggatcgccccagcgtgcggcaggcgtacgtttgcatagccaggaggtgaaggcttcatcttcaaccagcgctttggtcatctccgttttgaagtatcccggcgcaataccgttgacctggatattatgacgcgccagctccacgcacatgccgcgagtcagcatcttcacggcacccttcgacgcggcatatggcgtaatcgtgtcgcggcccagctcgctttgcatcgaacagatattgatcacttttcctgccttacgcgccaccatacggcgcgtaacggcctgagagacgagaaaaaccgcggtctgatttacggcgatgacatcattccactcctgctcgggaaactcagtaaacggatgacggcgctggataccggcgttatttatcaggacgtcaatgacgccgatatctttttcgatatgttcaatcgcagcttcaatatcctgtttatgggtgacattaaagggagcggcaatagcctttatcccttcctgctgaagtttcgtcacggctgtttcggcgcgctccggagtaatatcgttaacaataatgcgcgcgccatagcgaccaagaccggttgccagcaaataaccaattccctgagcggctccggtgataaggatatttttacctgccagtgaaaaaagatcgttcatgatagtgtcccttattttactttctcagaaaatgagctgaacttttgccgcctgtgttttgtctccggcaaagatcagcgccgcttccaggtcggtaaatggatattccgcgctcagtaacggcagcggattgataacgcggttggcaagccaggaaaccgcagtattaaattcggtagtaaaacggaaagagcctttcagggagatctctttgcttattaccatcatcatcgggaagttggggactgcgccgcccatgccaacctgcaccatcacgcctttggcccgtgtgacttccagacacgttgagatagaggaaggatgcccagagacttcaaaactgatatcgaaataccctttttctgctttccagccatcaagagaatcatgctgtgggttcaccagcgtatccgcgcccatctgccgggccagcgagagagaacgggcgctgatatcggcacataccacttccgccgcgcccagcgtttttaccgcgctaacaatcaggcagccgatagggccaacgccggagataaagacgcgtttgccctgcagatcgcccgcctcatgagccgcatgaatggcaaccgccagcggttcggcaaaggccatggctttttcgtccgcctgttccggccagggaatgcactgagcggtatcgacagctttaaatcgggtaaaaccgccatcgacatgcggaaaatacatggcgctgccaaagaaacgcatttcagtacagtggttttcttcatgctgcagacagtatttgcaatgaccacaaggcttcgatggattaatcgctaccggttgtccttcacgtaataaatctgagtcgctatgaacgattttgccaatcacttcatgacctaaaatcattggcgcttttactgtaaaattgccgactttgccttcctgataataatgtaagtcagacccacaaatgccgccacgggtaatttgtacgagtgttcctttattattccattcaatattttgttccgtaacggcaacagcacgcttacccgcaacaacgcaggattgagtttttacttccataaattcctcactggtcaggtagttaccctgaacgcatttaagcggttttatttgtcattatttgtgacttacgtcacgctggaaaattgttacactacaatgttacgcataacgtgatgtgccttagagttcttctctatggaaattaaaaaacgtgaaattgtcgaacgtagaggcgtaatattgtggagtggaatatgactcagaggtatttaaatggccggggaaagctatattttaatgggtgtttcaggtagtggtaagtctttaataggcagcaaaattgcaacattattttctgcgaagtttattgacggcgatgatctccatccggcgaaaaacattgataaaatgtctcagggaataccgttaactgatgaagaccgcttaccctggctggaacgattaaatgacgcttcatacagtctttataaaaaaaatgagacgggatttattgtctgctcgtcattaaaaaaacagtaccgcgatattttacgtaagagcagccctaacgtacatttcctgtggctggatggcgattacgctaccattctgcagcgaatgcagcgtcgtgccgggcattttatgccgccagacctgctgcaaagtcagtttgacgcgctggagcgaccgtgtgccgatgaacatgatattgcgcgtatcgatgttaatcatgacatcgagcacgtgacggagcagtgccgacaggctgtacaggcttttcgtcaggcactcagcgcttcctgatcattgtcaaagcgctgagtcaggcggtcagaagtcagcttttagcactacacgatagcgggctttgccgtcgcgaacgtgctggatagcctcgttgatttgtgacatcgcgaacagttccgtggtgggcgcgactttgctgcgtccggcgaatttcatcagtttgcgaagttcatatggcgttccggttgccgagcctgagatactgcgatcgccggcaattaatgtaaacgccggtacgggcagcggcttcaatacggccccaacggtatggaagttgccgccatacgtcagcgcttcgaagtagggctgccagtcgagatcgacgttgaccgtgttaataatgagatcgaactggcccgccagtgcttttaacgcttccggatcgcggctgttcaccacgttattggcacccatcgccagcacttcctgctctttcgatggattggagctgaacgcggtgacttcgcagcccattgcatgtaacagctttatggcgatatgcccaagcccgccaataccgatgacgccaacgcggctggtagcagtaatatggtgcatcagtagcggtttaaagaccgtaatgccgccacataacagcgggcctgcggacgccatatccatattctccggaagaggaattacccactgccagcccgcgcgaagcttctcggcaaaaccgccacgattgaggatagtgggcactgccccttccaggcagttaatttgattgccgctgatacaggcatcgcagtgtccgcagctgcgcgccgtccagccgattccaacgcgctggccgacttttagtcccttatcctgtgccgcgctaccgagtgcggccacccgaccgatgacctcatgtccggcaaccagagggtattgagagaacccccattcattgtcgatcattgacagatcggaatggcagatcccgcagtagtcgacccgtacctcgacatcttccggttggagttctcccgcgtcatattcatagagttcgagttcgccgcccgcctctttggcggcgtagctttttattatcgtcattgtgcttcccttaatgtggtgttgaactgaaaagtgtagagcatggaggcaagggacgcccggcgttaatctgctggagaaggcgggaagtagcctgattattctatttaatcctcaacgctgctgaaattttcagcacttagcgatacaggtgtatgctcgtgcttgcatggcggcgtatgacaggtataatccacaacgttttccgcatacctcttcagtgccgaagtggcgaaatcggtagacgcagttgattcaaaatcaaccgtagaaatacgtgccggttcgagtccggccttcggcaccaaaagcatgtaaatggacctcagctgaggtcttttttatgtctgaaatccgcgctatacaaggccttccacgatttttccttcaactgaagtcaatctaactcaacccacatcaacaagcttgtgagtatactaatgagtatattttccgattctatattgcttgtatactcacgagataccaatcgaaggaggtctatcatgacctaacggatactaaagttcgttctgcgaaacctgaggataaagagtattcacttgttgacggtgacggcatgtccttacttgtaaaacctaaatagctgcgccaaatagtagatcactttgagggaactcagcccggattgtgcgatctgatcaatcgccaaaaatcacaaatcaccaaccggactgagcgatgccgatcatagcaccaattccccgtgacgaacgacgcctgatgtagaaagctatccataaaacgcacgataaaaattatgcccgcaggctgactgccatgctgatgctgcaccggggcgattgcgtcagcgacgttgccagaacgctctgctgtgcccgttcctccgtcggtcgctggattaactggttcacgttgtcgggtattgaaggtctgaaatcattatctgccgggcgtacccgtcgctggccgtttgagcatatctgcacgctgttacgtgagctggtaaaacactctcccggtgattttggctaccagcgttcccgctggagtacagaacttctggcaataaaaatcaatgagataaccggttgccagttacatgccggaaccgttcgccgctggttgccgtctgcggggcttgtgtggcgaagggccgcgccaactctgcgtatccgtgacccgcataaagatgaaaagatatctattcgctattttcagaagggcagcgggcatatcacgtttaagcgtctggatctggtggagaagatgaatgatatcgtggctaaacactatccggggatgttgcctgtgaaataagatgtgatgtttttataggcacctctatactaatcttaataggagttattaagtattattaaacgaggtaatccctatggcttcttccgctaaacagaccatcagcgcccagattccagttgagttggctgctgctgttgaaaatctggcaattgagttagatcgttctaagagctggattattaaggaagcattgaccagtatgctggccgaaagagaacggcgtcatcagagcatccaggccggtcttgccgatgtggatgctggtcgtgtagtgagtcattcggatatggtagattttgacaaccgtttaaaggaaacctgacaggcaaagatgttgctatccgagatagtcgcctctcattgccatttgcttaaatattccccatactagatacatgtgtttattacacgtgtaattttaggaggctctatgccgggtatgagtgtacgacataaaaaaacagtcagtgtcacgctggaacctgcattgcttcagcaagcccgtgatgcaggtattaatctgtcagcggtgcttaccgccgcgctgaaagaggaaatcagtgccacaggcgttgaacgctggaaagcagaaaatagagcgggtttgcaggagctcaatcgtattactgatgagcacggccttttatcggacgattacaggacgttttaatcatgcaatacatggtttatcgcaataaaggaaacagcaaggcttatccttatttacttgatgtgcaaagcgatattattgatgaactgcatactcgcatggttatcccattgtttcctgtgagcagattggtaaataacccagttaagcgcctcacgcccactctgaatgtggaaggtaatgactatctggtgatgactcacgaaatggcgagtatcaggctttcgcagattggtgatgaggtgatggacgttcgttcccacaggcaaaccatcaaaaatgctctcgattttatctttgacgggttctgaatggcttgcaggtcaaatggagagttgttcaccgttctggaggggacttgacgcgcttgaacctgtggaagaagatgaggcgtgattttaagttaactgcgttttcagagaatcgcgcatgagtatacatgtgagtatatatagcggttctcttgttttgtaatcttatttacttcaataggttacgtcgagaatcgcggtgcggccttcgcaccatacaaagcttttttcaagtctactaacgtctactttagtcgataaaaacagtaagttaagcaggtttctgacttagcctagtctgttcacgtctactcaattccttgaacatataccaaccgatgatggtgtaactgatggtattcccggttcgattgattttggtaccaacactggagatatcaactgatggctctcaccgatatcaaagttaggactaccaagccctccgacaaacctttcaaactcacagatgggcagggtatgcacctgctgatcaaccccaatggttcaaaatactggcgactccaatactgtttcgtgggtaaactgatcctacccgcgtaatagggatacaaccctaagcgcggttctggttttcaaattgttccggactgagaccgccacaggcactgtggcgacgccagcgattgtaatcgcactcaatataattaaacattgctgcccgcattatttcccggctggcaaagtcctctccatgaatacattccaccttcagcgtgtggaagaagctttccgcacaggcattatcgtaacaacagcctctggcgctcatcctgccccgaagattatgccgtttcagtaagctctggtaatccgctgaacagtacttactgcctctgtctgtatatatgatgacttttccggtcttttacgccgccacagcgctatctgtaatgtatcgcaggcaaactgtgccgtcatccgcgaggacatagaccagccagtggctgaccgcggccacaggtcaataaccacggccagataaagccagtcttcaccggtgcgaagatacatgatgtcacccacccatttctgattcgggccactggcgtaaaagccctgcttcagcagattctctggactggcagaccatgttcgcggtaactgactggactgatcttccgtgaagctttcgcccgcagcacctgccggcgcaggctggccgctacggtttttatgttatacacccgtccctgagcacgaagctcatccgtcaggcgtggcgtaccgtagcgctgttttgcgtcactgaatgcctcccgtacgacgttatcacagacaagtcggaactgctgacgccggacgtaccagctgttacgggcaacctgaagtacacggcatatggctttgatactgaactcagcctgatgtttttcgatgaagacatacttcatttcaggcgtttcgcgaagtatgtcgcgaccattctggagaatggtcagttcctcatcccgttctgccagttgacgcttcagacggacgatttctgcggacatctcctgttcgcgttcagaagaagagagctgattttgctgtttgcttcgccagttgtagagctgcgattcatacaggttaagctcgctggtagccgcagccatcccaatgcgttagccagtttcaaggcttcgtcgcgaaattcaggcgtatgttgcttgcatggctttttggtggttgatgctgcttttgtcatgtgagacacctctttcttgagagtttactcactttgtcgcatgtccactcttgctgggtaagatcagacaacccattctctcaataaataacataaacatttttatttggatgtgtttttttgtttatgctttttaaataaagggttgatatgaaattttttaaacatgtggatattagatattccacaaaaagtattaatggatcatccacttattaatggggatgttgtgtaaagataaaaaaatagtgatccttgttttttttcttaaatttttaaaatggcgtgagtatattagcatccgcacagataaattgtgcgaatgctaatagttgatttttggagattttgtaatatgcgtaaatcagcatctgcagtagcagttcttgctttaattgcatgtggcagtgcccacgcagctggctttgttggtaacaaagcagaggttcaggcagcggttactattgcagctcagaatacaacatcagccaactggagtcaggatcctggctttacagggcctgctgttgctgctggtcagaaagttggtactctcagcattactgctactggtccacataactcagtatctattgcaggtaaaggggcttcggtatctggtggtgtagccactgtcccgttcgttgatggacaaggacagcctgttttccgtgggcgtattcagggagccaatattaatgaccaagcaaatactggaattgacgggcttgcaggttggcgagttgccagctctcaagaaacgctaaatgtccctgtcacaacctttggtaaatcgaccctgccagcaggtactttcactgcgaccttctacgttcagcagtatcaaaactaatttaatttaaactttataaatgccctcaatatgagggcatttggataattttattattttaaaaatatctattttgaatagataggttttatgcttccatgcaaaaacttaaagagggattatgtatattttgaataaatttatacgtagaactgttatctttttctttttttgctaccttccaattgcttcttcggaaagtaaaaaaattgagcaaccattattaacacaaaaatattatggcctaagattgggcactacacgtgttatttataaagaagatgctccatcaacaagtttttggattatgaatgaaaaagaatatccaatccttgttcaaactcaagtatataatgatgataaatcatcaaaagctccatttattgtaacaccacctattttgaaagttgaaagtaatgcgcgaacaagattgaaggtaataccaacaagtaatctattcaataaaaatgaggagtctttgtattggttgtgtgtaaaaggagtcccaccactaaatgataatgaaagcaataataaaaacaacataactacgaatcttaatgtgaatgtggttacgaatagttgtattaaattaatttataggcctaaaactatagacttaacgacaatggagattgcagataaattaaagttagagagaaaaggaaatagtatagttataaagaatccaacatcatcatatgtgaatattgcaaatattaaatctggtaatttaagttttaatattccaaatggatatattgagccatttggatatgctcaattacctggtggagtacatagtaaaataactttgactattttggatgataacggcgctgaaattataagagattattagtttaaggtgtaaacaaatgaagaaaaccacaattactctatttgttttaaccagtgtatttcactctggaaatgttttctccagacaatataatttcgactatggaagtttgagtcttcctcccggtgagaatgcatcttttctaagtgttgaaacgcttcctggtaattatgttgttgatgtatatttgaataatcagttaaaagaaactactgagttgtatttcaaatcaatgactcagactctagaaccatgcttaacaaaagaaaaacttataaagtatgggatcgccatccaggagcttcatgggttgcagtttgataatgaacaatgcgttctcttagagcattctcctcttaaatatacttataacgcggctaaccaaagtttgcttttaaatgcaccatctaaaattctatctccaatagacagtgaaattgctgatgaaaatatctgggatgatggcattaacgcttttcttttaaattacagagctaattatttgcattctaaggttggaggagaagattcatactttggtcaaattcaacctggttttaattttggtccctggcggctaaggaatctatcatcttggcaaaacttgtcaagcgaaaaaaaatttgaatcagcatatatttatgctgagcgaggtttaaaaaaaataaagagcaaactaacagttggggacaaatataccagtgcagatttattcgatagcgtaccatttagaggcttttctttaaataaagatgaaagtatgatacctttctcacagagaacatattatccaacaatacgtggtattgcgaaaaccaatgcgactgtagaagtaagacaaaatggatacttgatatattctacttcagtcccccccgggcaattcgagataggtagagaacaaattgctgatcttggtgttggggttggggttcttgatgttagcatttatgaaaaaaatgggcaggtccaaaactatacagtgccatattcaactcctgtattatctttgcctgatggatattctaaatatagtgtaactattggtagatacagggaggttaacaatgattatatcgatcctgttttttttgaagggacttatatatatggtctgccttatgggtttactttatttggtggagtgcaatgggtaaatatttataattcatatgccataggcgcaagtaaagatattggtgagtatggtgctctgtcttttgactggaaaacatctgtttcgaagactgatacatccaatgaaaatggtcatgcatatgggattagatacaataaaaatatcgctcagacaaacaccgaagtatctttggctagtcattactattattcgaaaaattatagaactttttctgaagcaattcatagtagcgagcatgatgaattttacgataaaaataagaaatcaacaacctctatgttattaagtcaggcattaggatctctgggttctgttaacttaagctacaattatgataaatattggaaacatgaaggtaaaaaatcaataattgctagttatgggaagaatttaaatggtgtttcgttatcgctttcatatacgaaaagtacatcaaagattagtgaagaaaatgaagatttattcagttttctactcagtgtacctttgcaaaaacttacaaatcatgaaatgtatgctacatatcaaaactcatcctcttcaaagcatgatatgaatcatgatttaggtattactggtgtggcatttaatagccaattgacatggcaagcaagagggcaaatagaagataaatcgaaaaatcaaaaggctacatttttaaatgcttcttggcgaggtacttatggggagatcggagcaaactatagtcataatgaaataaatcgtgatattgggatgaatgtttctggtggggtgattgctcattcatcaggaattacgtttggtcagagtatatcggatactgctgcactggtagaggctaaaggtgtaagtggggcaaaagttctgggcctaccaggtgttagaaccgattttagaggctatacaatatccagttatcttactccatatatgaataacttcatatctatagatccaacaacgttaccaataaatacggatattaggcaaactgatattcaagtagttcctaccgaaggtgctattgtaaaagctgtatataaaacaagcgtgggtactaatgcattaattagaattacaagaacaaatggaaagccactagctcttggcacagttctttcacttaagaataatgatggagtaatccaatcaacatctattgttggcgaagatggtcaggcatatgtatctggattgtcaggagtgcaaaaattaatcgcttcgtgggggaataagccctccgatacttgtacagttttttactctcttcccgataaaaacaaaggtcagattagctttttaaatggagtgtgcaaatgaatcagtataattcgtcaatacctaagttcattgtctctgtttttctgattgttactggttttttcagctcaactattaaagcacaagaacttaaattaatgattaaaataaatgaggctgttttttatgaccgtattacaagtaataaaataataggtacggggcatctatttaacagagagggaaaaaaaatcctcattagttcaagtttagaaaaaattaaaaataccccaggggcatatattattagaggtcagaataactcagcccataagcttaggataagaataggtggagaagactggcaaccagataattcaggtattggtatggtatctcattctgattttactaatgaatttaatatttattattttgggaatggagacattcctgttgacacatatttaataagcatatatgcgacagaaattgaattataataaagggtgcgcaaattggcgcacctataactcttaattataaagcataaatgcagctttttctcctgtatttctatgcttatattttagatggaattgttttggggttaagccataatagtcagaaaataatttaatgaaatatgatacgcttgacattcctacggcatatgatactttattaatatgggtgtcgctatcaagcaccaaacgcgctgctttttgcatcctggcatccagaaggattctgtaaaaattagtattttcattctcaagtttttttctgatagtcacttctgataaatttagtttttcggataatgtttttaatctccatttcgttgaaatgtcattatctattgtttttctaacaatatcagaaaaactacgtgagactgaaatgcacagagatgtgtatagctgctcgatattattcacttttgaaaataagcaggcaatttcataaatatcattattgttattttttctcttttttaaatattcaaataaaattccattaattccattgtcggttataataaaaaccttatcgctaaatgttctgtagcgtattggtgataaactttctgagcaattagaagcctcaaataagcataaaactctacttaataattcatctggcaaagtaataatgtcaaatgattcaatgtcatccatatattcaatttccacaacggcttctatatttttttctattaaggctatgttgcctctagttatttttatttcctctggctttgacttgttcttaatggtaacaatacagtttttcgaatgtaaaatagcataacgatatagttttatttttatggcgttttttttcaacatggaatcgcacctaattttcacgcttcactgcagaagccgattttatattattgtaggtattgttttatgatataaaaataactttattagatatgattatccgaaggtgatgttttaaaatatctaaatgcagtgtaagccatgtgtggttgttataagtgctttataggagttgttgtttcgttatgctcaattaattatgttcatctatatccaacggagagccatgtgatatttcttttaatgccggtactgtacagtccgggcaggcttgattggatctataaaaatagatatgactatctcctaagattttaaattctccgtataaatgttgaatggggatactgcaatgcctttgatgtgacgtcttaaaggtagggctttatacataaccaatactcgagtgaatctgatgaaagtgaatatgcataaatgaaccatcaaaatattcacatatttttacttttcgtcttggtttgaccatatcgtaatgaggttgctatagaatggattagtattattttgtggtagtggtaaatacatttattttaaccttgaagagtggggctgtttatgggtgaatccatcattacaaacatcatctccataatccgggagcgtcagagtgcggacaacgcgcctgttaaaatccgcgatattgctgatgctgccggactcagtatctaccaggtccggtcatatcttgagcaactccgtgctgtcggggtgcttgagaaagtaaatgccggaaagggagcgcccggattatggcgtctgctttgaccgttttcccggaagacggggacatcaaccggatatggtacgatcggttttgtatcgaatttaacagcgacggcggactgagtccggctgaactgcgggttatccgactgctgctgcagggctataactgcgggcagattgctgccctctgttttcgcagcgtcaaaaccatttcagcccagaaagttctggctttcaggcgcctcggcgtcaggaatgatgccaccctgttgccaaccctgatgcttctggggatggtgacactgtataccgacctgaaccggtgtcattcactggaggagggcggcccggaatgtgggtcggaagccggataagtatcactgaaagttattttatcatgttcatgaaattcgtttattacgcctgtctggccgtcgtcatattaatggcaatggtcttttgtgtgtcagtgctttttattctggaaaactcatgaccggaatattccggctgccggcttaatgaccgtgccggatgaattaagatttactgctgctgtcaggcggtgccgttaagcggcctttcattctgtatatctgttatccatggagtgtttccgtgacgatgaattatgcccgggagctgtttttcctgaggggaatattattttctttttttttacctggctgcgcccgtcctgtgattgcgcaggagtgggagttcataacgcccttggtggctgatgcccccgccgaggtggaactattttccttttactgtccgccctgctatgcgttctcacagacgatgggcgtggcccaggccatccggcacgtactgccgcacggtgaccggatgatcaagtaccatgtcaacctgctgggccccctcggccatgagctgacacgggccagggcgctggccatgatgatgaaggaaactgacgtggtcgagaaggccttcttcatggccgacatggtggagaaacgcctgcattccccggacgatgtccatcgggtgtttatgtctgccaccggtatcagtcgcggggagtatgacagaagtataaaaagtcccgccgtgaatgacatggtggcattacaggaacggttgtttaaggaatatggcgtgagggggacgccttccgtgtatgtccgtggccgttaccacatcaacaatgccgccttcagcgcattctccgtcgaagacttcaggagccgttatgctgcggtggtccggaaactgctggccggtaaccctgatgccgactgatgataaaggcaccatacaggccggagatatcctcccgctccgtgcgctgattctcctgctgctgaccagcgtctttatctccggctttctgaccggcgtcctggccatgctctggcttatctgccgtggggcatgatgtgaagtccggtctcccctgtaacagaaaacataactttcaccaccacgatgttcagatatttatgtaaccagaaagcagcactgctgaccgccattctcctgatggcggccggcgtgctcaccctgtgtttcccggagtcctggtacccgcaggaaacagaatggcagctcacagcagaaaaagaaattaccgggatacacggcggcctctccggcctgacatggaacccggacagcagaacgctgtttgccgtgaccgaccacccctcctcggtggtggagctggacacggaagggaacgtgctgcgggtgataccgtcagacggcgatcacgattttgaggccatcgaatacctcggcgggaaccgctatgccctgtcccgggagcgggaacggacgctcaccacccactgcattgacagcagcacgaccgtcctcccgccggcaacatacagcctgacgctggatgtgaacaggcacagcgacaatgccggttttgaaggccttgcccaggggcggggagagcatgccctgatggtggcgcaggagaaaaaacctctgcggctttacgtgacggaccagagccctgatgcgctgtcggtgagtgactcgctgacacaccgggcctccctgccatggttcctgaaggatatctccggcctgcattatgaccggaacaacgggctcctgtatgtactttctcatgagtctgacgtggtcgtggtgtcggacctggacggcgggagaaaggtgatgtcgctgcgccggggacactatggcctgcgaagggatatcccgcaggcggaggggatagcctcagatgaccgggacacgctgtggatagtcagtgaaccgaatctgttttaccgcttcacccgcacggcttcgtcctgaggatgaggcggcgtggaaggtgaagtaaaattcgccgcgtgaagccggccggcattggtgccggtgtcagcggtggatgctgacagtggaaagatgatgaaaaacataacattcagcgcatcttttttcagggaattattctggtttgtggtgatggtgggaagctggttgatgaccttcccctgtaagtatcccgcataatcgtgccattcacatttagagatcctccggcataatcaatctgccaacaaaggagatcgctatgcgtaaagcccgttttactgagcatcagatcattgccgtaattaaatcggttgaagccggacgaaccgttaaagatgtctgccgggaggccggtatatctgaagccacctggtacaactggaagtccagatacggcggcatggaggcttctgatattaaaaagatcaaggatcttgaggacgagaatcggcgtctcaaacagatgtttgccgacctgagccttgagaaccgggcgctgaaagacgttatcgaaaaaagctttaaaaccagcctttaagcgtgagctggtcactcatctgataacgacatttggactcagtatccgtcaggcctgccggagtctgaacctgagcagaacggtttaccattaccgtccggataacacgcgtgacgaacccgttattgtcgcgttgcaggcagtggcagagcgatacccacggtacggttttccaaaacttttccaggttctgcggcggcagggatacccgtggaatcacaaaaggatccatcgtatttattgtctgctgaagctgaattttcgccgtaaaggcaaacaacggttgccggtgcgtaatccctcgccactggccacaccggaagcgcttaaccagagctggtctgtcgattttatgcatgatgatctggtctgtggccgtcgttttcgcacgttcaatgtcgttgatgactttaaccgtgaggcattgtcgattgaaatcgatctgaatctgccagctttgcgcgtggtccgtgtactcgacaggaccgcggcaaatcgcggctatccggttatgctacgcatggataatggtccggaatttatctcacttgcactggctgaatgggcagagcaacatgcagtaaaactggaatttattcagccgggtaagccgacgtagagcgcttttattgagcgctttaaccgaacataccgtacagaaatactcgatttttatctgttcagaacgctgaatgaagtgcgggaaatcactgaaagatgggtgtcagaatataactgtgaacgccctcatgaatcactgaacaatatgacgccggaggaatatcggcaacacaatcatttggccgggatctcaaaaaatgcctggaactaaaacgggtctatttacagcgagtccggccttcgcaccaaaagcatataaatggacctcaactgaggtcttttttatttctaaaatccagaagttacctacctttctcggttgagcgctgtgttttttccgttgttatcagaatgctaactgtcagtacagagccgacagacaaaaagtatgtctgcaataatgtcttgaatgtacatatagttgcgagcatcatcgcaactatgtgctcatggattcttcaacgtaatgacctctgacaaaaccctaaagcaagcgatatcaaatattactatctggcgcaaaggcgaacagcgagcgccgcataagccgttattgctgttatatgtcctctcgcactatcggcagggccacgatcgtctatttgattatggttctgaaattcatgagtaattgctggatttactggagcgctatgggccacagcgccgtgaacagcgcccggatatgccgttctggcgtctgaagggcgatggtttctgggaattgcaaaacgcggaattctgctcaaccagcggtagccgccagccacctaaacgtgaactcattgaatataatgttgctggtgggtttgatgccgtcaatttcgcgctggtaacaaaaaaacgtaagctaatcgacacgctggcgcagcagatccttgaggcgcattttccgaccagtattcaggaagacatcgctgacgagatgggttttgatattcgcacctctctccgtcaacgcgatccgaagttccgccaggcggtgctacgagcttacaattatcaatgtgcggtctgcggcttcaatatgcgccacgacaacgcccctatagcgcttgaagcagcccatatcagatggaagcagcatcatggtccttgtgaagtacctaatggcctggcgttgtgcgcaatccatcataaagcgttcgatcgtggttcgattggcctggatgaaaatatgcgcgtggtggtttccgacgcggtgaatggtggcggggtggtacagcggctgttctgggattttgcggggaaagagatcgcgttgccgcagatgaaagaaaattatccgggtgaacggtttgtggaatggcacaagagggaggtgttcagaggagggcattgatctgggggagtattttgagtgtggtatacgttatctgtaaaaaatagctccacatcaaaggcatcaaagtaatcggccacggttctcgcactatggtctgtagcgcgctggtggagtcacacctgtggtcaatcgacgcgtagagcgccagatgagccatcatgagcgcaagcggaatttataaggcgcggcgccttaaagagcacagggagattgtaagtagcccgatattgctggcttttgcttagcttgctgacgggattcgtcgtatgaaacatgaaaattacctcatgttttatataaggattcgacactatatcaaaaccggtaactctcaatctttcaaagctatgtgtcagatcaggtcgtgataagacacgtaaatttaaagatctatatatctggccagatagacttttttataacagctttataaattaaacaaatctgtcatagagacagatttgtttaatttataattagaggtttgcaacgttatgatatactttttgcacatcatcatcatcttcaagggcatcaacaagtccttcaaagatttctaaatcttctggtgaaagttcaacttctgattgagcaatcatttctaattctgttgttgaaaattcagtaattccagctgcttttagcgctgcaattcctttgtgcaggtctgtagcttcagtataaataacgatgtttccttcttcttcggttacatcacgaacatcaacttcagcatcaagcaaaatttcgaaaatatggtcagggtctgttcctttaaatacaatcactccagtattgtcaaacatatagctgacagcacctgccgctccgatattcccgccttttttattgaaaattgtgcggatattagcaatcgtacggttaacattagacgtcaacgtttcagcgataaccattgaaccattgggtccaaagccttcataacgcccttgcacgaacgtttcatctccgccacctttggctttatcaatagctttatcaataacatgttttggaacctgtgcttgtttcgcacgttcaataacgaattttaaagctgagtttgattccgggtctggttcaccttgtttagccgcagcatagatttctacaccaaattttgcatatactttagacgttgcaccgtctttagccgtttttttagcaacaatatttgcccatttacgtcccactggaaacatctcctcaaagaattatttacattaatggcaggttaataatctgcatgtttttctgccgtattatatcataatatataaattctcgtctatgagaaataaaaagttccagcttttacggaggattactttgattttaacaatagctaatatggtgggtaagtcattttttaattttcttctggttctttttttattcttaataattgaatcgcagcaataacgtcttattgatggtggtttcgttcatcaggtgaggtggaacgcttgcacgttttgcgacatattgtggcagaaacttaatggcgaaattaagagcctatcccattagggctattttacttgccattttggacctgggcagtgctcaaaatcctcacgtactacgtgtacgctccggtttttgcgcgctgtccgtgtccaaactggctgcgccaataacgcctggtgggatagtctctaagacgatatattcccgccttgagccgcgttaatttgttgcatacttttaaatggaggtatacctcttgtaggctatacctcctgcttcacgttatcgcgcgattaacgcaaatacgccccagccaaagtattctcgcgtccaggtgacgtgacgtttgggggctaccgtcagttctgttcgaacctcctgcgcaaactcatcgtcagggttttcctccagccagcgacgcatggtcatccacttcgcggcttcatatctgtcccagccttgcgggtccgccagcaccatttccactacgtcatagccgagttggtcgaaaaaggcgaccagctcgggcaaggggcgaaaatcggcgacggatgagacgccacaggcgtgggcgatctcttccgttgcggggatctgacgccagtacggttcaccgatgagaatgatcccgccaggtttgaggcttttggccagcagatctattgtccccgcgacaccgcccgcaatccaggtcgcgcctacgcaggccgccacgtcatatttttcctcgtcgatataaccggccgcgtcgttatgaataaaatgtacgtattcactgacgccgagctcttctgcacgttgttttgcctgtgtggtgaagagcgggcttatgtcaatgccagtacctgtaacaccgtaatcgcgagcccaggtgcagagcatctcacccgaaccgctaccgagatcgagaatccgcgtgcctggcttcatgcgtaacgcatggcccagtgtggcgtacttttccgctgtaaacggattatggatacggtgttcgctttcgctaatggtaaaaatacgtgggatatccattgggttattccttttactgagggtgattccctcagcgggaggggctttttcagccagtagcgcaaacagcttgcctgcaaaagtctcgccgaccggccaggtgtgactgtccgggcgctgcaacacagtgaagccagcatcaccaagcaggctgatatattcatcatcgcgccaggccttcatttgactgccgaaacgggtggtacagccgttttccgctatcgcccagaactgcgttgagctggtttgggcctcttcatcccaggcattttccgttaacagcagatgaggctcggcaagaaacaggccgtgcggacaacgctgccagcatggctgcgccatgccctggcgtttaacttcatcgaaggtatgcacttcaacaagcagtttgccgtccggtttcaaccactgcgcgcaatgactgatgaggctttgcgcatccgcagcgctaaagacattcagttccccaaacgtcatcataatgaaatcgaaaggttccgtggggtggtatgtacgaatatcttgctgaatgtagtcaatattcaggtttgcggcttgcgcctgctggcgagcccatgtgatggatgccggagagaaatctacgcctgtgcagtgaaacccacgctccgctaacaggcgggtataaaaaccgggtccacagccgagatccagaatgcgggcgccagcgggtaactgacgggtaatccatgttacctgttgctcaatcacggttagccggcggctggcccagtcgtggtcctgtgacagatgattttccagcatgcgttggctgaaggctggctcgtcccaggggattttgccttcatcgggtaatagccgaatgcgatgcgttgcaaaaataacggcgctgatatccatcatcatctccttagcgattatcaggctgggcgcgaacgttgttcagcccggttgtattaatgcggtagggctgaccgttaacggatttgatcagctttttggttttgagttttttgaatacagcgagcgtgcaatcggcgagcaacagcccttcgcggctatagcactcaacggcggtgacgcggcctgacgcatcgcggatgtgcgtaatgcgtccgcctttggcgagaacgtgtaaggtacgttgttcctgacgggataaattcatactgaagaacctgtttaatcatcataggcaaaacgtgcaaacacactgcggtgtccgcattcgatttcggcacattgataatcagtccggcctgaaaaggtcggggaactgattatcagatgatgacattctccagcatcaaagcctcgggttgagttgaaaggtatttacgtcgtgaatgataacacctgatttctgtaagtgaataaccgggagtgaaaagtgtgatctcaaagggaggatcatgcgtttagtaagtcagttgaatagatcccgccgctaccataatgaatattgattaaattcatatacccgataatggccgctttgataatctcggcgtatctttttagccattgacagggttgttgcgttggaaatctttttttaacccactgaaaaatatcacttaaatatttttcatacataaacatttatggtccgctgagttcggatccggttttgtatgggttaaaaaaggtacgttatgaaagtcatatggactgtcactcctgtggggtatcagcgcatagcgaaacgttgcccttcatgcagcgtaaaacgggacttcacgccttctggggcatttcgggttaattcgcaaaagaaggtactcgatgtctggagtatctataaatgcacacactgcgattacacctggaatatctccctgttctcgcgcctgccagtcagcaaaattaaccgcgatctttatggccgactgatggcgaatgatgccgccacggtgcaatattttgcttatgacaacgcgatcctgaagcgaaacaatgctgaattatcggggcagcctgattttcacattcaggaacggtggctggtcagtatcgcctcccacaagcaggtcagtgttagcgtcaggatttcccgttcttttcaggtcagcctgctgtcgattttgaagaagcaactcctgttaagcgcagccgaaatcaagagacggattgaaacagggcaaataagtggcgtcacgatgaaaatgcttaaatcgcgaaaactgaagaatgcgaaatatgatttgcagctctcagttgaaacactgtatgaccggcgaaggattgttctgacccgtcgataaaaataataagctcaccttatgtttaagtgtgctggtatggcaacgacgcaacggaatgaaagaaggattaagggacaggtgagctttagttgaataacgcttgtctgtggcattcagtgaaggctgaatgccatggataatccagattttcgcaccagtgatgatcagcagaatgacaaagggcgatgggctacaattatctgtagagtaaataaatattcacgcaacaccattaaaaaataagaaaaaatggctcactgttgaactgatattaatacctgaaccactgaattagagtaatgtggcgctattcatagcgtaattttttctgttgcggttacagggggaggaatgcacacctttagaccatactcactaaggcatagcgatctgttatatgaagatattccgttagaaatacgcgagcaaataatcttattgattatcaatacgctaggaaactgctcctctttttatgatatgacattatactgctatcataatagtcattctgacgaagtttatcgaagaatatgtaaaacgttgcgcaaagagtatggcttattcaccttatatgcgcattcaacgtcatatctggatgaaatgagtaatctgttattaaaaacagatgataaaagaaagcatattgataccattgagcttgcttttaactatatagatacttaccttcggacctatgaagttacgcttgggttagaaccggataaggcgattagtgaattaaacaatatatttcatgagcatagtttaaaatatcgctatgaaaatggtagaattgtaaggctgcgcagaataaaacggcttaaaaacatatgttattatttgtactctcctggagagtatggctttgtcgaatatgatcttatggaagcgtataatcgcctgatacttaatgattttgcctgtgtcgtaagggaatgtcatgcagccttcagaagcgttcttctcagaattcatgagagaaaaggtatcgtatatcatgaacaagatagtttaaatacactaatggctaatctgatggcgagaggcgttatatctgctgaatatgtacataaatttcattttttaagtgacgtgctggagtcagaaatatttctgccgatggcgccagaaaagtcgcatcatcactacgcaatgatgctccgtatctctgaagagttggcctgtagtatctattatcttactgagcggagtatattttttcttacccagcgggctgaagaagacagtgtcgcgccataataatgatcgcgctgtcgctcagtcagactggatcatcgttatttaaatttgttcagacgtcggaattttttgttctgccgtctgtttttttagtgatgagctgttcagtgcaataataaggggtacagtacgatgactgatttttaaactgcatatcatctgtgtcgcatttactcatgggtattgggtcagggagagagaagaatgagcactattttaaagccttttttattggcggtaaccctgatgttaatcttaataaggcttggctttgcaacggaggatggagcgataaccatggttaaaacctacagcgcttatgactatttgcagacccgagcgcggttgatgcacgctgtcgccgatcacggtctggtgttatttggggaatttgatcatgccagagcggcacagaatgttaacctgaaaatgccgccgacaacggttctggtctttggcaatcctaaaggcggaacgcctctcatgctggcgcatcccgaactggcactggatttaccgtttcgggtgctcattagccagcaagccgatgggcgaacgttagtcagttatcatcccgctgaaacgctgcaacgttatggtcttgatgccgcagccatacaggctttgaaaaaactggaacagctcgttgaaaaaagtctccactaaagctgaaaatatggcttcaatcgggcgatgtgtttgcacgagtgatgtcgcgaataaatgcgctcacatcgtccattacctgatgcgataaggcggcatcgaaggtggcgctatcagcatcacagaacccgtgccgcgcatcgtacattttacaccgcacccagggtcgcttttccagcgtctgtcgcatggcgaggggatcaaacgccggctcataacgcgcgataataaccagtgtcggacagagaggcgcaagatgaaggtactggcgtatacgggaaccgtaatagcaaatgacgccatcgcataacccactggctgcacttagccatgcgagcgttgcgccgacgctataccctacgacgattagcgtctcgtactgcgttctgagatcgtggagtaatgtggtaacgacggcgggatcaaagccgacatttgctgaaaagtgacggtaagcctcctcctgctgttcatagcgaaagggggtatggtgaggaaacagcgcgggaatatagatgtcgaatccacgcgtcatccattcatggcctgcgcgttggatatgagcgttaataccataaatttcatgcagaataatcgctgcccggcgatggcggctcgacaaactggaggcgttgcttcccccggatacgcctggggcgaaaaacacggtgtcttttatcataacgcgtttttgatacaaagagagcggctggattttcgccgatcacgctatgtcagaggcattgttcctgtcaatgtacagacacattttatggcctgatttttggttgataaattttatattggtaaaccaatatgctgttcatattcaggcatcagggctaaaggtggaacatcagtcgtgtattgtctattgcctttcctttcatctggcctcactagcgaaacggggcgcattattattttgttggttgaccagtttcgcgtttttggtgtgctacgcgtgctatccctatttacaaatgctatagtctgataccgggaaatcgcatcggacgggcacgaccaatatgaaatcaaacacttctcagcaaagaccttaccaggaagtgggcgcaatgatacgggatctgattgttcagacgccgtaccgccccggggagcgcttgccgccggaaagagagatcgctgagaggctcaatgtgacgcgtaccgtcgtgcgtgaagcgctgatcatgctggaaattaaaggtctggttgaagtccgccgcggcgccgggatctacgtgctcgacagcgcggataataacgagatggaaggcgctgacgtcaatcactgtaatgacgccgggccgtttgaactgttacaggcgcgtcagttgctggaaagcaatatcgctgaatttgccgctctgcaggccacccgcgaggacatcattaaaatgcgccaggcgttacaactggaagagcgagagctcgcctccagcgcgccgggcggctcagaaagcggcgatatgcagtttcatctggccattgccgaagcgacccataacagtatgttggtagagctcttccgtcagtcctggcaatggcgtgaaaataatccgatgtggctccagcttcatagccatctgggcgatacgctttaccgtaaggagtggctggtcgatcataagcagatcctcgcggcgttaattaagaaagacgcccgcgcagcgaagctggcgatgtggcagcacctggaaaacgtgaagcagcgtctgctggagttttccaatgttgatgacatctactttgatggctatctgtttgagtcatggccgctggacaacgttgatgcctgattatacctggaatagcgtgggcaggcccagtccacgttttacttcctgtagcgtcttttgagtgacctcatgcgcccgctcgctaccttttttcagtaattccattagcattcccttatctgcaataaaggttgcccgtcgttcgcgtatgggcgcgatcagttcttgcaggcaggtctccagctcatttttacagacacggtcgcctaatccgccttgttgataatgtgctttcatcgccgcgactttggctttatccggatggaacgcatccagccacgtaaagacgacgttaccttctatttttcccggatcgctaatttttaaatggttgggatcggtgtacatcgcgctgaccgcacggtggatggtctcttcgctggcggaaagaagcagggtattgccgagcgatttcgacatcttggcgctgccgtcaatgcctggcagacggcccatatcgctcaggagcgcctgacagggtcgcaataccggcgaggagaaaagactattcatcttatgaacgatctcattcgtttgctcaatcatgggcaattggtcgtcgccaaccggtaccatttcggccttaaaggcggtgatatctgccgcctggctaatgggatacgccatgaacccgaccggcagggaacgggtaaagcctttttgggcaatctcattttttaccgtaggattacgctccactcgggcgacggtaacaatattcatatacagcaccgttaattcggcgagggcgggtaacgcggattgcaggcagatcgtcgtcagcgtgggatcgatgccgacggccagatagtcagctaacacttgcggaatattatcgcggattttttgcggattactgccgttatcggtgagtccctgcaggtcggcaatcaggacatactgttggtgatcctgctgtagcgcgacgcgctggcgcagtgaaccgacataatggccgaggtgcagcgagccggtggggcgatcgccagtcagaatgataggaagggtgttcattaaggactcctttatgcttactgtaaagccgaaagacgtcccgaaacgcagtagccgcctttcggcggctacttaaagagggatagtgatccgtgccgccttcaggaaggcagccaccagcggagatgacgttgcgtagcgttggatcgtttcgtgttcatgtgatctaacgtatcacgactaaacgtaagggtaaagcggctggcgtatcgtccgggcataaagtcatatcgcctgaacagataacatgtcactgactttgaaacgcgattttataatttgctgcccaaaaatacgtggcgctgaaaggcgcatttttgatgcaaatcatttattactgtgataacactgcgcgcgataaaaacattaaatatattcacatagtaaatatgttctattggaatggttgttttcgatatgacaaaagtctaaaaaacccattgatgtgaaaaggaataagaattgtctatattccgattcggtggaattaagtaatttctcggataaaaataagaaatgatattgatatttcttttttgatatggttcttatagcggctatggttattcaggaaacgatgcttgaatgcctggcgtaatagatttcaggtcagtagcgctattgtaaaatggattgttgatggcagaaggtatttagcaagaatccagttatagcagattgtcggtatttaatctggtatacagagacaccaacgaaatggctggaaaatggaacgttctttcattgttggcgttccgtccttgtcagcctgctttgccgcatgataatcacggaggggggatggacgccatctatttaaaactggacggtattgaaggcgaaagccggatcaaaggttttgaaaaccaaataaaacttattgcttacaaccacaacccgacaaaacgggagtccggcgaagcgagagggacatatattggagggttgacgctgacaaagccagtcgatcttgctacaccaggcctctatgagcactattgtaacgggaaaacggtgaaagaaggcgtgctgacattatgccgtcgtgataagggcgcaatgctgccatttattatttatacgctcaccaatgtgcgaatttcacgcatgagcaatcatggcgacgccgaaggcagcgccacggagaccgtggatttggtttatagccatattcgctgggatattcccgcattagcgtcgaaaagcaaaacacggcggcctcttcaccgacaggcgctgtggcgatgaggacaaaacaagcttgcggactcgcagtgggcgatgctgtatagcgaaatggcatttagcggcttgcgaaggtcgatgagcgctcatgtaaccaatcgattgcctaaaaaggcgataacgcatggcccttacacccgttatgatttttacgcatagccgctaataaaacggcattttttatatacacatcaagttgatagtgtgtttctgaccttgacgtaaataagcgggaaaagcgatgaaacacaccattgggatactgggggggatgggacctgcggcaacggcggatatgttggaaaaatttgttgaattgcgacatgccagttgtgatcaacaacacatcccgctcattgtcagctctatccctgatattcccgatcgtacagcatgtctgttatccggcgggccttcgccataccgttatctggagcgttatctgcatatgctggaagacgccggggcggagtgtatcgttatcccatgcaacactgcgcattattggtttgatgatttacagaacgtcgcgaaagcgcgaatgatcagcatcctggacgccaccctgggggatattccgccatcggcgcggcacgttggtctgctggcgaccaatgcgacgctggcgaccgggttatatcaaaagaaagctctggcgcgggggctgacgttaattcagccagaagaagcgggacaggcgttggtaatgcaggctatttatacgcttaaacgtggcgataaaactgtggcgcaagcgctgctgctgccgcaaatcgatagccttattgcccgtggcgctcaggcaattattatggggtgtaccgaaattccgcttattgtggccggacatgaacgcgcgatagcgtgcccgatgattgattccacagcgtcgctggtgcgcgcggcgattcgttggtatgagtcctggccagacacccgcgcctctttgaccggggaacaacgccttaccgcctgaggtgtttacagcgcggcctgaagcccacgcaggtcgcgccaaaatgtttcggctacctgactcatgcgggtattcatgcgataagcataagcctgaatcggaataaccagttcgtcggcatcaagcactatcaggcgtccgtcggtaatctcctgacggatagcatactcgggcaaccaggcgattccgcagccgtccatcgcaacctgttttaacaattcactcatcgaagagacgaaaaatgtactgaaactcagttcagcatggcgagtcagagtacgatttatcagccggcccatataggagttctgactgtaattaagcaggggaaagtgcggctgctcaagcgtatagcgcggctcgccccggccattgttggcgcaaaccggaaacagtctcgactcaaacaggcggatattatcaaacggcgcttgttgcaggttttcatcgtgataggaaaagataaaatcgctttgcccctcacgtaacatatccaccgcctggtcgacatctatcgcctcaacggcgtaggtaaactgcgtcggcatctgcttaacgatggtcggcaacaggccgagggagagcgagtgggcggcggcaatcttgattttacgcagcgtataatcgctgccgccgcgcagttcggtcagattgctttccagctgctgtaacaggtggcgaacctgagagtgaaagattttaccctgttcggaaagctgtagcggcgagacctggcggttaaacagttcaacgcccacggcatgttccagggcgcgaatccgccggctaaaagcgggttgcgatacgttgcggataatggcggcctgagagaaattgcggcacttttccagcgtcagaaaatcatatagccattttgtctcaatattgtgcaaacctgctccagttacatccatttaccgttatcctgtcagtcgcccgaaggggcattctacgtccattcgggcggctgacaaccgcttatcccgtcctctttcagaatgccgtgatggggcagcctgaaactagcgggaattacgccggttcaaaggtaccttttacgcaggctttcccctcattgaccatgcgtttgccgcgcgcatacacctgctcaatgcgtaaatctgcgctaaagacaagcagatccgcatcgttaccgggacggatttcgcctttgccgtccagactgaggaaggcggctacgctggtcgtcagcggacgcagagcatcggtcaggctgaatccgtagtggttaaccagcgtctgcaacgtctccagcaaactttcgaagcccgcgacgccgatgcccgtcagatttccggcagcgtcaaatagcggctggctgccgttgccgtctgaactgagcgtcacccgggaaagcgggacgccggcttttaccgctctggcaatgccctccgccggcgcgacgggatccgggatactggtggtcatgtcgattacgccgcctttaagcgcaaacgccagcgcctgctcgaaaagcgattcgctacggttgacgtgggtaggcagcagtttaccgattggcacgtcgctgttttccaggatgtcatacagcggctgtaacccttttttgctgctgcccatatgaaaaacgctgacaccgggtttgccgcccagcaggccgccaacgcgtgattcagcggccatgctggcgagttgattcccgctgggcgcggcggaacggtggtcggagactgcgcatttcacgccaatgacgcggtcgatcagcgcgacgtctttttctaccgagccagtaatggtcggcgacggaacgtgataagcgcccgtgagcatccaggcggtgatcccctcctcatttagcgctcgcgttttggctaacagcgacgcgggatgacggctgacggagtcggtgccaagcaggccgacgaccgttgttatcccggcttccgtcaggcggctcagggagacttccggcgtccgcgtcgtcggccccgcttcgccgccgccgccgatcagatgaacgtgttggtcgataaagcccgggcacagcatacgaccgctaagattaatcaccgcacagtccggtacgatatcgccggggatgtcagcgccgacggcaataattttgccattcgcgagtagaacatcgcagatgccccggtcttctggcgcaaacaggtgcgcaccctgtaataaggtaaactccgcggcggataaatcaggcatgatagctccttattaaacaataagctgcatgacccagatcgacagcagcgcattgatggcgcagactgcgataatatgcgggtaatatttggcgttgacttcggcagtaccgagacagcggccgacattctgtaccgggtttcccatcaggtaaatggctggcagtagtacggtaacatcgtggccgcttagcgcgccggcggtagccagactggccgccacgccaacggcgccgcccatactcatcagcgaagccagaagcaccgtagccgcttcgccgggaagcccccacaacgccatcacgggctggcagatatggcctacccagtcgagcagaccggtaattttcagcgcctgaataatgacaaatgccatgaccacattgggtaacaggttggtcgtggcgatggtaaaaccgcggcgtgcgccatcgataaacatatccatgacattcttacgtacttgagtcgtcatgattgggctccttgcgcagggtgacggcgttcttcgatgttaatccagacgcgcaaaaggtttgcgccgataaatttgaatagcagaatgaccaccagcggaatgatgactgacgtccccagaaaggcgaataccgcaacgccggaggagaaatagttggtgataatagcgctgccgctggtctgccaggcggcaaaaatcactttatcgcgttcggtgatttcaccttcctgcgccagctctttagtcatacccgccgcggcgtcggtattttgcaggttggcgatcagcgccagtgagcaaatgccgggaatgccaagcaatggtttcaggatgggcgtcatcaattgctgtgccgcccgcagaccgccaagcccatccgtaatcgcgatgatacccagagaaaggataaccgacggcgccagctccagcgcaaaaaggaagccatctttcgcgcccgttccgcccgcgccgcgaaaggtctgcgtaccggtcacatgaccgaatgacccgttgagtacggtaaaatcaaaaacgcgccaccagccttcgcttccggaaaatacgccggaaaagaaaataatggtgagaaaaaacgccaggtatccctttatcccgaccttttctgtatcaagcggcatggccgccccgtccacttgttgcgccatagcgatccccgaatttttttgatgatgtgttggttgtagccacaggccaaaaagcccgaaacagaaagaccttatcagccataagggtaaggacaaaatgcaagtatgtatcgtgctatgcgtttcttgcatagcagcgcgaaaaatcaccatcctcgctactgccgggggcgcggggaaccgtggacggtataacgcgaggtaaaaaagcaaagaaacaggtgttgacgcaggccggagctgggagcaggaaaaaaggagaaataaatttgacgttagtcaatttcacgccacttaattatcgttgttaaaaaataggattttttaacctaaattttacttttttactgtaatttttcacgccttaagaggaattgtcacggtcaggtcagtagccgctgataggtcagcttgcgccctaagaatcctacgggcaggtaataaaaaacgaataatcgaattaatttcatgatgtgatttatttataattgtgatgatttgagaggcagcgataatcatcataatggaatatatacccaaaataattcgagttgcttaaaggctgcaagggagtgagtccccgggagcatagataacgatgtaactggagtgagcaacggcccgtcagggcgaggcccatggatgggccgggtaatccgtagccaacacagaagccacttgaagtaggaagggtatataaaataatagacagattgataacactaaaaaccatagaataagtatagtttttagtggcatctttaccttgaaataacgtgttgaggatgtgctattaaaaacagatccgcattgcgccgcgaatagcattaaagatacaacccggtgcagatagcgcgggtttactctaccgcttattcacgtatcacaaaccgtttttgttttatctgctgcgcggcgctgatcagcgcggcaaaaaagagcgccgcggcgccgcaaagcgtggcgttgataattgccgacgcgccattgcctgacagactggcggcgagcggaccgagaatttgcccaataccatacgttagcgtcaccaggcctaataaattaatattgcccggcgcgctgagctgtcgggctagcggcatcaccagcgaggttgtgcccataaacgtggcgccaaaaccaatactgctcagtattaacagcaacaacgagtcgctggcgagagacagcagcacgcaggcgctctggatcaacaggttcgcggtcaggcatggcaggacaccccaatgttttgccgcccacagccagccgaagcagccgggaatgatcgccaggccgaccaacgaccaaaggtgcgccgtgagtagcggagagcccgcgcttttcgccatcagcggcaaataggtagcgacaatgatgtagccgaatccggcgaaaccgtacaacagcgccagttgccaccagggcataggctgattttcgattcttgctaaaggcgcaggcggcagcgcatgagcgcgggggggaatcaacattgccacgattaatagcaatataccggcgagcgccccggcccccagccatagcgaatgggccgaaagcgcataatgtaaaccgccaatgacatattcgttacccagtgcaatcccggccccgacgccggaaaagagcgcggcgatcacaaacggatggcgggtatgatgcaacacaatcattgatccaaaaatcatcattcccgcactcgcgacgcctgccaggaagcgcaccaacatgacgaccgcgggctgagtaaatatcgccatagacagaataagaataccggtggcgaccgccgaagccagcagcatggggcgtagacgagaggggagatgaaaaaggccaaaggaaaacagtaagcttcccgccaggtaccctgcataattggcgctggcaatccaggagagctgattaaacgttagctgcttttccgccagcattaccggcagcatgggcgtatacagaaagcggccaactcccatccccagcgtcaataccatcataccgaaaagcgccgtaaaaatgggatggcgaggtgaagcgctctgagcatgaaccatggtttttctctttgctaaagtaaggcaggagtgccggattgttgttgtaaatgataataaaaagtaaaattaatgtttcaaatttgcaagaaaagaaagtgaagcgcaggcgaataacggattgagaagaggggcatcggtgggaaatggcattaaattaatgcctcccacgtgcggggtttggcagttaatctgaacgagaattgcgccttccccttcttagatactgagcagtgccggtatttgcgacagtaaatataacaccagaccaatagcgccgccgaccagcgtgccgttcacgcggataaactgcaaatctttaccgatattaagctcaatctgctgcgacatatcgcgcgcatcccagccttttacggtatcgctgatgtggcgcgtcaggaaggcggcgaattccggcgcgacgcggtgcgcggcctgttccagatgaccgttaagcgaggcgcgtaatgcgtcgtcggcgatcagcgtctcgccaaaccattgtccggcatgagcgatgcgctgcttcccctttgagtcttcggcgttgatatctgtttttaaccactggcgtagatccgcccagatttcgccgagataacggttaaacgcctcatcttccttcaggtaacttttaatgttttctgcccgggcagccatttccggatcatgtttaagtttatcgatcagcttatacgtcgcacgatcgaaggcatgacgaatctgatgcgcgcggtcgtgactgatatcatccagcagagaatttaccgcgtcggagaccagttcagcgctgtgttctcccagccattcagtcggcagaatcttcgcttttaacggatgttcggtttccagccagcgtatgatctgtctggcgataaatgttcgggagctgtcacgctgtaacagggcgataagctgggcgatcagcgtatcgagtaacacctggtgacgatcgtttttggtcatgctttccagcatcagggcgctggtgccggaaagatccactttatcaatcgccttatgtaccgctcgcttgagcagccgctgaatacgggcgtcatcggttagttccagaaagccgctcataatttgcagcagatgctgcccgacccggctggcgttgtccggctggctgaaccagtttccgataagcagcgcgggttcatggcggcggattagcgcgatcagcgactgcgtatcaaggaacttctcctgtacaaattgcccaagattttcgccgattcggtctttgttacggggaataatcgccgtatgtcgtgaaataaacggaatgggaatgcggcgaaacagcgccaccacggcaaaccagtccgccagcgcgccaaccatcgccgcttcggcaatagcttttacgcccagcacccaaaaactgggcggcaggaaaagcgtggttacaaacgtcgcggcggctatcagcaacagtgagagcgccaggcgtttggcgcgtttgagttcggcgattttattcatagggttaaggatagagccagacggcaggaacgtgcaaaaaacatcagattatcctgtgccggataagcctctatccggcagagtgtttacttctcagcggccagttctgccgcctcatgctggcgcacgcgctgtaatagtgtcgccagagtgaagaccacaatcaccccggccaccgctgccagcaggtgaaacggcagtctcccgccgtgaaaccacagccagcggccaacttcgaccgacaccgccatcaccgtcagaatcaccatgttcagcgaggctgaaactgtcccttttggcaagttgttggaaaaaagcgtgaagcgaaacagcgtcgggaaaatcatgccaatgccgaacgcgtacaggctggtgcccagcacagaccaaagccagacgtgcggcagaagaagattaccgaggagcaatgtcgccagcccgcttaactggattggtacggcgcgccagataaaacgcggtcgggtcggatctttcaccaggcgcacaacgatcatattggccacgatcaccgcgccgaatacgggcacctgcgcccaggcgaattgcgaagtactcatcccgccggcatcgatcaggatcaccggcgacaccgccacccagctcatcatcgggatgtagctcaacgacagcgtcgccgccccggtgagaaaaatcgggttgcgaaacacattacgaaaatcgcgcagtacgctcaccgcgctgaacggcaccgcgccgcgttgcaccgtttctggcatcgccagcagcaggccgcacaatgccaacagtcccatcaccgcaataataccgaacagtaccttccagtgaacgaagtgcatcagcgcggcgccggagagcgggccgataaccggagcgaccagcacaatggaggtaataatcgccatcagcttaatggctttggtttgaccgaaggcctcctgtaccgtgacgtagccgaccgttgcgataaagcaaatgctggtgccctgcacaaaacgggcaaccagaaactgcgtcattgaggtcgtcaacagcgttgccgcgcaggcgagagtaaaaattaatgcgcctgcaatcagcactggccggcggccaatcctgtcggatagcggccccagaagccattgcaacgccattcctcccgccagatagagactgaccgaggccggcgcaagactgacgtcagcattaaaatcgcgcacgacgttaatgatgccaggctgaatcagatccgtcgtcagataggcggcaaaatcgtacaaaatcagcgccatcgggaaaaataacgttgtggcgcgttgggagaaaaactgaataatccgttgcataaaaaatgcgctccatgtcggagaaccccatgatgggatagcgaaactcaataccgtcatcgtgacgtcaggcaggcgatggaaacagcggctgcggatgtactgaatttcatgtaatcaaaaacgctgccggtgaaaacacagacaggaagagacgcgttctgaatctcgtcagaacgtgtggcgattacagataacaatcagcacatcacacctcgggaaatttacgttgcacggaaaatatacacattaagtgtaattaaattttgatgttaatcaaaagagtttgtctggttaataaagataaaggcagggcgcgcagactggcattttgcgtgttcagttccgaaaatgcatgtgcattacagataacaggatttatcttccgtcgcgcctcgcaatgctgaaaaggtacggatgagaaaggaattttcaggaggtagagtcgcagcatcctggtttggggtgacggagcgccatgaaaaaatcgacgacctcaacaccgcatgatgcggtgtttaaaacctttttgcgccacccggaaaccgcccgcgattttatggagattcatctgccggtgtcgttacgccagctttgcgacctgcggacgctaaagctggagcccggcagttttattgaaaaaaatctgcgagcctattattccgatgtgctttggtcgctgaaaacgcgcgagggcgacggttatatctatgtcgtgattgaacatcagagcacgccggatgcgcatatggcgtttcggctgatgcggtatgcgatggcggcaatgcaacagcatctggatgcggggcataagcatcttccgctggtggtgccgatgctgttttatcacggtgttgatagcccgtatcctttttcgctgtgctggctggatgagtttgcgaacccggaagtggcaagaagactctatgccgctgcctttccgctggtcgatattacggtggtatcggatgatgacattatgcagcaccgccgcattgcgctgctggagctcatccaaaaacatatccgccagcgggacctgctgggactggttgaacggattgcttcgctgttagttactggttgcgctaatgacaggcagcttaaagcgctgtttaattatcttatgattcagcacggacatacgcctcgtttcaccacgtttattcgtgatgtggtagggcatgtcccgcacactaaggagagactgatgacgctgatagagaggatccgcgcagcggatcgcagaaaaggggaacggcaaggaagacaggtcggtctggaggaaggattagaaaaagggctggaaaaaggtcagcatgttgccgcattgcgtatcgccagacagatgctggcggacggacttgaccgcgagactgtccagcggttcaccggccttacggctgaagagcttcaggatgttagtcactaacacggttccagtctgaatgttgcaggcccggtgcccaccgggcaacgctctctataattatcgttgataaccgcacgaatataccgaactttaccgatagcgccagccatctctactacccttattgttctgagcggcatttacggctgccttaatgacgataacaaggagacatgtgatatggcttaccagacagtgaatcctgccaataatcagctcattaaagagtatcccccgcacacgggcgcggatattgaaaccgcgctgcaaaaagctgacgcgctctatcactccgactggtccaagggagagattgaccaacgtctgccggtactgcataagctggctgacttgatcgacagccgtgttgaagaactggcaaaaatcgccagccaggagatgggcaagctcatcgagcagagccgtggcgaagtcaaactgtgtgcgcagatcgctcgctattatgcggataacgcgaagcagtttcttgccccggtgccttataaaaccgagtttggcgacgcgtgggtagaacatcatccgattggcgtcatcatggctgttgagccgtggaacttcccgtactatcagttgatgcgtgtgctggcgccgaacctggccgctggtaacccggtgctggcgaaacatgccagcatcgtaccgcactgcgccgagacatttgcccatctggtgcgtgaagccggcgcgccggaaggcgcatggaccaacctgtttatttcctccgatcaggtggcgaacatcatcgccgacccgcgcgtgcagggcgcggcgctgaccggatctgaaaaagcggggagcgccgtggcggcacaggcggcgaagcacattaaaaaatcgacgctggaactgggcgggaacgatgtgttcgtcgtgctggacgatgccgatcttgagaaagcggtgaaaattggcgtgcaggcacggctcactaatgcggggcaggtatgtacggcggcgaagcgctttatcctgcatgagaaaatcgccgatcaattcctcagccagttcaccgaggcgttcaggaaggtgaaggtgggggatcagatggacgcttctaccgaactggggccgctgtcgtcgaaagatgctctggatacactgaccagacaggtcgaggaagcggtgaaaaatggtgcgacgctgcacgttggcggcacgccgctggaaagcaaaggcaacttctttgagccgaccattctgaccaatattacgcgtgacaacccggcgtactttgaagagttcttcggcccggtggcgcagatgtatgtggtgaaagacgatgatgaggcggtgaaactcgccaacgattcccactacggcctgggcggcgcagtgtttagtcagaatatcgaacgcgctaaacgcatggcctcccggattgaaaccgggatggtttatatcaactggctgaccgacaccgcagcggagctgccgttcggcggcgttaagcgttcgggcttcggacgcgagctatcggatctggggattaaggagtttgtgaaccagaagctggtagtggtgcgccgctaatccctgttgcccctctgaaatcgggaggggcctggctttttgcagcgaaggacgcagatcttaaatcagaacgaaataagcgaacaaaaccccctcaattgccctccttatttatccacgttgcactaaccgtgctttttatcccggtattgtttgtacagacattcatgatgcccgcattttctgttctatgcggaggctggtatggaattttacgagaaccgccccaggcaaccatttattggctttgtgcagctcagacgggcgctaaaaaggtggtggctgcgtaagcgggcctgtcaggcgctgcgacgaatgagtgatgagcagttaagggatattgggttggaaaagaaggatgtggaataacagataagagccagtaaaactggaaaggctggataatcttatcttaacctctccagtaggcgggtatcctggaacgctaattttcctgccaggctttctcgatcagcagtttggctttatccagatcgtgttcgttacgcacaatcaattcgacgtcgccggttccccagtggccaatgtttgtgacgtcccggctaaatccttcttcaagctggatatgctgtggattgattttcagccacaggcgtaggtgtgggtcggtcacgggataaacggctacgcacagaaagttgcgaatgaggcggaaggcgtcatagagcttaagctctttaaactgaacctcatcactgagtgagagcacataactttttagctgttcatataatgaaagcagcgcgggagaggctgaagagagctgttcgcgctgcgtgcgggtatggcgtttaccgctgctgacggaaccgttcgcgatgatgtactgagggctattttcgaccacggcgttaaccagttccagcattaacaggtcgtcggcaaaaagcttgtagcggatcaggttgatattgcggttgatttgctgaacggcatgttcgtcgtatttattaaaatcggcggcaatacagattaaccgtgtgccggaccagtcaatggctttggccgcggttttacttattttttccatcaccagcaactgaaattccgctttatgatcgagcagccagtcgagataaaacagcccctggttaatgacgttttcattgctgtggcgcttatattcaataatcaccgggcagttattttcatcgaggccgagggaatcaattcgcccacgatgggttttacccgtgtggtattcggtctcgagaaagcggacgccaaggaacgtttccatatgggattcgatcagcatttgcagatctttttcaatggctgcggctttgcccggcagttcttgtactttcccgccaccgaggcggaaaagctggatatcgctcatggatccctcctgaattttctgcgcactatcatacgttatgtgaaaagagataaaagcggaaatcgggcttttggaggtgagatatgttataagcccgacagcaggtggttaccgggcagcgggccgtaggtcggataagcgttagcgccatccgacgctaaaattaatgcagcgtatgactatggtgctgcttaaaattctccgcctgcgacagcacgcccatatacacatcatcattcgccaccggcgggaacttgtgcttgtgcagcagcaggattagctccaccttcagcttcgccttaatatcatcacgcttgctccagtccggatacttcgaggtgttatcgaccaccgccttcatctcttttgccagcgccagcatcttgtcgtcctcataggtaaactgatacttatcacgcatatgcgccagaatgtcgtaaaaggctttctcttcgatatcaatacccatctcggcataggtgcccatctcggttttaatatcgtagataatatcggtcatctcctggctgaagttatcaaactcttcaccgttgaggacgtcatcttcccggcgctcgttatatttatccataatggactggaaacgacgggtgaaattgatcccctgaagctggttgatctgtttaaagtcgctgatggctttttccagcagcttttgcagcagctgaattttggtggccggcagtttgatcttattaatgcgcgccagataatcatcgtcgaaaatatcgatcgactccgctttcttgtcaccgaggaaaaatagctcttccacgccgtcggctttcagcgcttcggcgatcatctcgcgcacgcgagcgttcatctgtgtgaggtccggcgcgtcgcctttggtcagcttgaagacgatagagcgcacggcaatgtaaaaatggatatggtcgcgctcggcctgcgacagcgcctcgctgccgcagcagacgtcataggccgctttcagccgcttcaccagccccataaagcggcgttccagcttctgggtgcgcatgacaaattctgccgcgaagttcaggcaggcaagctgcgcctgcggctcgccgctgaaataagggcggctgtcgaattcatggaacacctgcgccagcagatcgagatgatttttcacctcaatgactgactgctgaatatcttcaaagttggtggcgtcaatgcgcgaatacatcgccagcgcctggttcatctggcgcttaatgccgatatagtcgacgaccagccctttgcttttgccttccatcttgcggttaacgcgggagatggtctggatcaggttatgcttttgcagcggcttatcgatataaatggtgtccagctccggcacgtcaaaaccggtcagccacatgtccaccacgatggcgattttgaaattcgacttcgcgtttttgaactgtttatccagctctttgcggtactctttactgcccagcaaatcgtacagtttcgcgtcatcgtctttaccgcgtgtcatcaccatcttgaccatttcggacggcggcagctctttctcctcctgcccggtcagctcaaccccctccggggcctgcttaacttcaaaccacgcgggacgaaagtctttcaactgacgatagaaatcccaggcaatctcgcggctggcgcagacaaacatcgctttgcctttcaccgttgagccttcggcgacacgtttttcatagtgtttcgcaaagtcttccgccagcgctttcaggcggtcttcatcgccaagaatggcgttcatggtggcgctggcttttttgctctcgtcgatttgccactcgttggtgcccgcattggcgcactcttcgtaatacttttccacctcttccagcttaccggcatcgaggatgaccttcgcggcgcggccttcgtagacgatgcgcacggtgatctcatcctgcacggattcagtcatggtgtagctgtccacgataacgccaaagacgtccatcgtggcgtcgataggggtgccggtaaaaccaacgtaggtggcccgcggcagcgagtcgtgcagatatttggcgaaaccgtaggttttacgcaccctgccgctctctttatcgacgatcactttctgatcgaggttgacctggctgcggtgcgcttcatcggaaatacagatgatattgctgcgctcggagagcagttcggtatcttcggtaaatttatggatggtggtcaggaagacgccgccgctgttgcgaccggccagcttctcccgcagatcgtcgcggctggtgacgggcaccacggtgtcgtcgccgatatagtttttggcattgcacatctgcgctgagagctgatcgtccagatcggtgcggtcggtgatcagcacgatcgttgggctggcgaattcgacgcttttcatcagcaggcgggttaagaactgcatggtgtagctcttgccgcagccggttgcgccaaagtaggtgccgcccttgccgtcgccgaaaggtttacgcgcccgttcgatgctgtaatacagcttgcgtgccgcatagtactgcgggtagcggcagcagattttcacttcgtgtttggctttatccgggaagcagataaagtttttgatcacgtccagcaggcggaccgggtgaaacagcccctgaatcatcgagtgcagggaagggatgccgttctgctcgcggttttcattgccggtgactttgcgccaggaatagaaatactcgtacggcgcaaacaggttgcccatgcggttattgacgccgtcgctgataatgcacagcgcgttatagacaaacagctgcggaatatcgcggcgatagcgggtgcagagctgtttccaggcatcgccaatattggcttcctgctcgcgcaccgcacttttaaattcaaacactactaacggcaggccgttgatatacagaatggcatccgggatacgcggctggttttctttgccggtgatggtcagctgattgacgatttttacccggttcagcggctggataagatgataacttgccggcgtttctgcggcctgttgcagcggcacatcttcggtatcgaacagttcacgcagcgcggcgggcagatgccgggtgtcgagcagttcgatatagagatctttctgctggcgatcgtcgcgtttaaacaggaaaccgttggccagccaggcgcagaaggttttgttgctttcatagagatcggaggcgggcagggtggtgaactgtttgatcagccgctggatctcctcttcggtgatgccgtcggcctgatagcgtgcggcgaggtagtgacgaagatcgtcttcgataatcacctgatcgaggctggaacgcggcacattatcgccgatcaggtgctgatagccctgatcctgtaacagttcaattatcgcctgttctaacttcgcttcactgaatgagagatgcatatctcgctccggccctggctgattttctggtaagggttcctgtaacagagaaaaccttaacagaaagcccctgatttttcaggggcaaaatgggttatgcgggttcggtttgtttggctaagtttggtagatcctccagggacagctcgccggagatgagtttggggagcagggtgtcgcggaggtttgttaaagcaatattttgataattattattcagtatttttgaaaaataatttttaacaagcaaagaatagctatttgttaattcttcattgcaaaaaggaactttaatatttttgaatgtatctcttgttattgtgttgaaaactgagccgtgtcccatttgttgaagggtttggactgcattttttaattggaagtaaatatattcatcagaaatattatttttaccgataacaccatagcatgactgattcattgccatcggtacagcaaccatagcgcatttccctacagttcctctggcgctgattattgttgttccttttcttaataactttgcggaggaattgttgagtccttcaatggtaatttttttctctgtagttaatacgtatacgtcggattcactaggtgcatcgacgacagagaaccatggaatatctccattccagaactcttctacagaggttttaggtgtgccaccaccaattagttctatcaaatcgttgaaagatgttgttatccaacctttcggcatccaacctaactctgtttcttcaaattcagccgggaacagtgcacgaatatccgccggaagtggtttgaaatctgcactattgcgaattttttgacgcagttcagcgcgagattgcagcgcttccgggattgggtttcccgcatccagcgcgttgtcaatcaccgggtcgaaatccacaaaccaggatttgaacagggtttgggatatttgttccagggtatggttgagctctttatttaattttattttatcatctaaaatgccaataatatcagaagcttctttttcataactatagctggtatccgctacgagtattccactaaggtgatttctatttaatgtgggcacacctgagccaacattaaattggctaaaatcaatacttctaagtaaataataaacaaatctagggtggtgccccttaaaatccttaacccacaatgttgtgtttaaaggccaaaaattagttgttatatactgaccaccaccaatgctaccacttcgcccgataacaacacctggagctagaactttctcttcattgtggtaaccaacaactcccgttgaagctacgactggaatatcgcccataactcttttatcttgaggtaaatcgaaacctctttgaagagtgataaattcattgagtgggattgtcttttcaaatgccataacccagcacctccagattctgacgaatcgcgttatccagttcttccgcctgcttcatctgtgcaaacaacgtctgcgacaactcgcgcattttggtttcaaacgctacgccgtcgtcttcctgctcggcggcaccgacataacggcccggcgtcagcacagagtcgttcgccttgatctctgcaatggtcgcaaccttgcagaatccggcctggtcttcatattgcgccaactggctgtcgccgcgcttaacgcgctcgaccagctcttccggcgtgctgcgccaggcatggtaggtatcggcgatggtggcaatatcgtctgccgtcagctctttggtggtgcggttgatcatggtaccaaggttacgcgcatcaataaacagcgtctcaccctgacggttacgatagcctttggccggatcggctgccttcgatttggtcataaaccacaggcacaccgggatttgggtggtgaagaacagctgtccgggcagggcgatcatgcagtcgatcagatcgttttcgatcatctgcgcgcggatctcggcttcgccgctggtgttggagctcatcgagccgttcgccagcacaaaaccggcggtgccgttggccgacaacttggaaagcatatgcaaaatccagccgtagttggcgttaccggtcggcggcgtgcggtagccagcaaagcgcgggtctttggtcagctcggcgtcgttacgccagtctttcaggttaaacggcgggttggccagaatatagtcggctttcaggtccgggtgctggtcgctgaagaaggtgtccgccgggcgctcaccaaggttggcggaaagtccgcgaatcgcaaggttcatcttcgccagcttgtaggtggtggccgtcagctcctggccgtacagggcgatatcgcggcttttcccctgatggctttcaacaaacttcaccgactggacaaacatccccgccgagccgcagcaggggtcataaattttgccctggaacggttcgagcatttcggtcagcagcgtcaccacgcatttcggcgtatagaactcgcccccgcctttgccttcggttgcggcaaacttgccgaggaagtattcgtacacgcgaccgacaaggtcttctttcgacagcgcttccacgtcggtttcgtgggccagcgtttcgatgttatcgatggtgtcgataagcgacgccagcttcttggtttccagattctgacggctgaagtagttgtccggcagcgcgcctttcagcgacgggttgcgcttctcaatggtggagagggcggtatcaatgcgtacggcgatatcgtcctgcttagcgttttgcttgatgaacgaccagcgcgcttcttccggcaggtagaagatgttgtcctgctgatagaagacttccatttcgaggaaatcgccctggccttcgtcttccatctgtttgcgacgggcttcaaacttatcgctaataaatttgaggaacacgaggctcagcaccacgtgcttgtactcggaggattcaacgctgccgcgaagctggttcgcggtatcccataatgtgtcttcaaaacctttctttgctttggcttttttcgttggtgctttggccatgatgaactcaatcaggaaaaataaggtggctattgtaacggtaaaagcggtgaagttcgccctttagtcgatttccagctcatcaaacagctgtaaatccacatccagcagttccaccgcattgctgcgcctgatcccgacgttattttcgattaacaactccaacaggcgatcgccgtcgatcaatgtaatgggcgcggcccctggaaacagtgcggcctctgcgcatttggcggcaaacttgtcggtagtgattagcgtaccgcgaatggctttgtggtagggtagtgcaccgcgtagctggtcaatatagaggtgggtaatggtgttttgcatccgcttcacctgcactacttcggtaatggtggtgatgctgacctgcactttaccgatgacatacacgcctttgtcaccagaggctttgtgacttccacctgttcataacccatcgcttccagcaactggcccaccagatgttcaaatttgtacgggttcatggtagagagctgttcgcgcaacacctcttttggctgctcgttatagcgttttacggcgtcaagcagctctttgcgcggatcggtacgacgttcaggtagcgctttgttgagccattttcggactgcatcggtaattttgtagctcattcctttacgggcaaccagtcttcgttcgaccagattataaagccgggcatagagcgtagttttaaccgagctaggggaggcgaatttagagtgctggtgcaaggaagtctgccatttcggcaacagatctgcacgtctggcctgtttacggccagccagtaacgccagtagcatgtaacatgccttcgatatcaccaagtttgtgtagcgtggcctcatcgtgatccataagtagtcgcccctgttcgctggggtaccagccgccgtcctcggcagtttgcatcagatcgaacagagggttattgataaacatgtagcaaccatagctgtggcgtgggttcaggatatagttatccatattccagatttgccaggctatgctggcatcttcaccgctgagccgttctttaatccatttatccggctcggaccagtcaaccgggttctgcggggggccggtctgctcctgaatggcggtgatcatatttcgaaccgctttaactgagcatcttgcgacggctttcatcatggccagggtcatgttcgtatgttggaaaagcggggtaatcactttataattcttcacgtccatcccttaacgattgctgtgtcaatagtttgctataacaagtacaaaattccttgggatgaatcacttaacagatagaacgagatgattttagcatgcggtaaaagtggaatatttgttcatgaatatggagaatatccttggcaaaccatctgtctcattcctggcaatcctgattgagccaggtattggtcttgcctgtaaaacgatgttcatcttcttcctgattcagtaccgtcagtgggctattgattaatagtgtctgtaggtaaaatattcatataacattataaattcaacgaggtgagtttgtgctggaaagcatattgtaatgaatgtaacttctcttcaagctccttttgtttcattattaattgcttcagatcagttttttttacttgtggcctgaagtataacgaggctgacagattgtaatcatgagcagatatttcgtttagggaagtgagtctggatatttcagtagtgctgcgtttggtaattaactctaataataaatttacattcaggttgttttttttcctcacatttatcattaagatatcattagttttttgctttttcttaaaaactataatatttgttgcgattgcagtagttttgaacataccttttggtaggtagataattgcggaaatatggttatttttaattattttttttctgatttcgtattccttgccttctcggaaaagaatgccatcaggtaggataatcgctgcccggccattatcttttaacataaaaatgcaatactgtaaaaaagcaaaatcagcatttgatgttggtggcttaccatacatacaaaagtgcatttccatatcaaatggaatttttaaagaaaatggtgggtttgaaagaataatgtcaaaattttttttaagattatgcccctcagtaaagtaagatgggctgatatttgatggagatagatcatttaccagcatcttcatttttgaaattttcaatctgtctacgtcatattctgaacctgatatagcaacttggtttttaatgatttctgagataaactcaccagagccacaagcaggatcaaaaaaagactcgcctttttgtgcctgaattatgttacccatgaacgtgacaatttcgtgtggagtgtaatgtttctgtgtcggggggcggttctcttcaatgagagatgtgaataagtctagaatactatggatagataaagtattaatgtattcattacaaatttctgtaatccttgaaatataatttttgatatcacggctttgtgaaaaatcatagagggtaatgttagagaatattagtttaaactccttttgatttaacttaatataactattatcgtttattatttttttttcataaattgaaaagatgctggtaaaatctgtatggataagttgcctgctggcattgttaagtaaatggcacagtacggtagtttcaaggcaaatcatcgtttgagtatatttgtcaatactatcacaactgagtgactgtagcattgttaaaaaataatgttcgcgcataatattagccacggtagattaatctattaattgcagtatggcatagagtcgttccattttctattaaatcctcaagcgtttttttttgttcactccatattttacgaaggccgataacctcatcctgtacaggccgcaatggtatgggtatttcaagtgttaatagtttttttaaactaagattcacgactaatcctccaccttgtagagcagaaattttctcatctccttctggagaattaaaaaaataatacagatattcaggattaattaaaaggctgttaactcttattacagcaatttggtttgtcgttgttacaagtgtactctgttggttaacaatcatcatagccggtatcctttcccctctgagtggtaaaagaatatcgttagtttgaagatttattttcagtttctctggctgaatatccgcaaaaggaagcgctgaaaaatcagtcagaataccttcttgtatgtccttaatctgcaggagtcttacatgacctgatgcagcctcagctttggttcggaatgtgtgcccgccagtaacctctgcgacctcagaaagcaatttaatcatcactttttctcttgtttgttatcgatgtagagattaacactaataaaagttgttgtattctctgctatgtaggcgctatgtgactgaatatttacattaaccaaaacattgtatgaaacagctatcaaaaaaacacacaatactccgccagtatcccgtttccttttcattttgatctccgttttggtagcaaaactcgtatagaatagtgtgtgcagtaagctaccgtactgcataagggattgtcacttggttttatgtcttttttttgtttgtagaatattggggaatgaatttgtatacaccgatgttcttaatatgttgatattaaagattatattaaaattggtaggttaccaagaggccttcccctgataagacggttgtgtctggccgtcgattgtaaattttagcttaaagtggctccctgttgtttccactaaggcgaccggttacatgttgtaagaaaaaggagtactaataactgtgctatggctgtttgaaatcaccgctcggaaaatctgcggcaggttgctgaaaaaaagatttttatgggaagttaacggataataccagtgtattatccggcttgggggaatgcctacgttacatctatcgtgttatctgcttataggtagtgagaagatgctcgctgagtgcattttctccattcatagttatcagcagattatagcgagcccgtgtgaagccaacgtaaagccttttgatatcattgctcaagtcttcttcatttttggatctggctgcgtccatgacagcgactgactgaaattcgagtcctttactgctcggcagaggcataacacacagccgttcttgctgtggcgaccagttttttttatcggcagaggtaataatcatttgataagggatattgcgagccgtcagttgtggtcccagcacgtctttaatgctataggttgatgggcacaatatggcaatatcaaaccacggaatgccccgctggtgctgttcgataacccagttaaggatatgcgttatttcctcatcctggttatcaaaacaggtcaactcaggataagaacccgcaattccgcctgagtcgggctgctgatatttaagagcatcctcaatgtgattattgagatagttaaatgcaatgctactagcgaaatgtaatatttgctgagtattacggtaattaatattcaggattgtcgttcgcccctgagctttaatgccgacgctggataaggtgaagtcgagcgctttctttttctgataaattgattgtgcatcatcataaaggaaaagcagtgtgttatttttggtgtctgccattcgggtaagaattcttagccactcaggattaaaatcgtggccttcgtcgatcagcacggcgctgtactgctctggctggatgattccatcctcaaaggcgatagaaagggcattttccattagctcaacaaagtttttgctttttggcggtagccgtccataagactgtaattgttgatgacaccataaatgaaaatgtgtgacctcaacaggaagcctgagcgtatgtttctcaataagggctttgagttttctggcgagcgtaatgttgtagcaaatgaccaaaacaggtttttcgttttcaatattatttgcaagttcgaggcaacggtgaagtaatatcagtgttttaccagatcctgcaacgccatgaatcacccgatgtccggaccccatgcttcttgcaagttgttcctgttgccggtccataatggatataatacttggtgtgtggagtgtgaaattctttacatcagcttgcttaatgggtttatggattcgaatatcaggataaagatgccatcttatacgatccagctgctgaggtgtagtctggtgagcaaagttgtatttggcaagtaatgcgagcctggcagctactttttcctgagacataaattcattgagttcatccttacatatcaccttatcggtagggagtatgtctgcaagttcggtaggtgaaaaggctttctcaagctgagagcgagaaatattggacagatacacgccgtatccatacggcataacaaaactgccctgatattggccttcttgctggcgaagttgtggatctgttttgaggctattaatggtctggaaagcatactgacgaacttgctcaataggattttttaaactttctataccatttttagtttcatactggacatatgttttattagcacctttgatttttgtaataaaccagtccttaacttcaatgaataatatacctttgtcgggggtcagaataacaaagtcaggatgactatgttgtttgcccatcggcgtgtcgtaccagcaggtacagctatcgcttaaccctctctccagtagccttgccagccttttttcgcctgctgtaattttctcgctacagctacttacggtgggaataatgattgccatattacacctatatattcatgcgatttatgctattcaagcaaaataacgcaaaatcaaataaattaaaaacttcgttttattttgataattttaacaaatattactgaaatcataaagaagaagaatatttatgataaattaatcattcccttttcggagggggaatggacggaggcgatagacgcctaatgccattctgcacgaagcgatgctgcgagagcaaaataagaaatagccagaagatgccggatgccggatgccggatgccggatgccggctgcgccttctgcggcctactcttctggtcaattttcttttatctcgaatacgcaaattgtgaagctatttccaacaatccaggtataatcgtaagataattgtatatacatttttgtatatacaattagggaaaacacatgccgatggagtttgaatgggatgcgaacaaggctaaaagcaacctgaggaagcacggtgtccgctttgaggatgcggtactggtgtttgacgatccccgacacctgtcacgtcaggagcgttatgagaatggagaatatcgttggcagaccctcggccttgttcatggcattgtggtcattctggttgctcatagcgttcggttcgaaagtggttttgaagttatccgtatcatcagcgctcgcaaggcagacagaaaagagaggaatcgttatgagcatggttaaacataaacgcggcaatgcatccgcgctgagtgctcagcatgaggctgaactgaaggcgctggcgaaaaaatcagatgatgagattgattacagcgacattcccgcttcggaggatgggcagtggtctgaagcagtgcgtggtaagttttttcgcccgttaaaaactcaggcctcggtgcgtattgacgccgatgtgatggagtggctgaaacggccaggaaaaggctaccagacgcggctcaatgccattctgcgcgaggcgatgctgcgcgagcaaaataagaaatagcccgaagatgccggatggcggctgcgccttatccggcctacaaattcccgccaggccagataagcgcttaatggttacttccttaaccccgcaaacgccgctctgatctcgtcttccggcaactggatcccgataaataccagcgtgctgtgcggcgtttcgtcgccccacggtctgtcccagtcggcgctgtagaggcgctgcacgccctggaacagcaggcggttgggttcgccgtcgatccacagcatccctttgtaacgcagcagtttatccgctgattccagcagcaggttttccatcacccgcgaaacctcgctgatatccaccgggtaatccagttccaccacaattgacgacacatcgttctgtttatcggcaataaagtggaaacgcggttggcttgccagcacgctctcttccagcataaagccgctggtattaaacaactgactcaggtcaatatcgccgtgtaccacggtgtaaaccggggcgcgggcgttgatacgcgccagccgctcgcgcagtttctcgctgtcgcctgccacgtcggttttggtcagcaggatacggtcggcgtagcctatctgcgactgggcgatggtgaactggttcatctgctcgttagcgtgcaccgcgtcgaccagcgcaatcacgccgtctaacaggtagcgttcgcataatacgtcatgggagaaaaaggtctgaattatcgggccggggtcagccatgccggtgcattcaatcaccaggcggtcgaaagcaatatcgccgcggtcgcggctgtcgagcaggtctaatagcgcatcttccagctcgttggagcgggtacaacagatgcagccgttagtcagggttttgatctgtgtggcgcgatcgccaatcagttgatcgtcaacggagacttcgccaaattcgttttcgataacggcgattttaaaaccatgttgttcgttgaggatatggcgtagtagggtggttttgccggcaccaagaaaaccggtaagtagggtaactgcaatcggggtcatagtctctccattaacaacagcgcataccgcctttgccatcgccgccgtaacgtgcttgctgacgttcgcggaagaactcttcataggtcatgtacggcttgtcgggatggttggttttcatgtgctcgacatagttgtcgtagtccggaataccaatcaacatttttgccgcctggccgagatatttttttgcctgacctaaagtatcaaacattctgccgtcctgttaatgaataaagccggatggcggcttgcgccttatccggcctacactagccgggatcgctgtgcgctacccggcatcagttttagtggtgtgaagagatcttcacgccgccctccggcacgggcacatacggggtttctttgtcggtacgtttatcgctgttgcgtaccttcatccaggtggtgaaaccgtagaagataatactgtacaccaccaccaggaacagaatactcaaaccagcgttagtgtagttgttcaccacgatatggttcatattggcaatctgctgcgcggtcaggttggtgccgttggcaatcttctctttatacaggtttgccatgtagaagaaaccttccatctgtgggttggcgctgaacagtttcaggcccagtgcccaggtggtgcagatcagcagccataccgccgggattaccgtcacccagatgtacttggtgcgctgcattttgatcagtaccacggtgctcaacaccagcgccacggcggccagcatctggttagagataccgaacagcggccacaggctcttcacgccgcccagcgggtcgaccacgccctgatacagcagatagccccacaaaccgacgcagcctgcggtaccgatgatacccgcgaccagagaatcggtttttttcaggaacgggacgaagttacccagtaaatcttgcaacataaagcggccggaacgggtacccgcatccagtgcggtcaggataaacagcgcttcgaacagaataccgaagtgataccagaagcccatatccgccatcggcaggactttgtggaacacatgcgcgatacctactgccagcgttggcgcgccgcctgcgcggttcaatactgacggttcaccgatatctttcgcagtttgcaggatttgttccggggaaatcacaaagccccaggagctgacggtcgccgctgcatgtgcggtaacgtctttcaactgcgccataatcagcggcgcgttctcgccgcccatctcgtgcaggtttggcatggtaatgcccagacctgccggcggggtgttcatcgcgaagtagagacccggttcaatgatcgaggccgccaccagcgccatcactgcaacaaaggactccatcagcatcgcgccgtagccgataaaacgcgcatcggtctcacaggccagcagtttcggtgtggtgccggaagagatgagcgcgtggaagccagagacggcgccacaggcgatggtgatgaacaggaacgggaacagagcgcctttccacagcgggccggtaccgtcgacatactgcgtcaacgccggcattttcagttctgggttgaggatcacaatccccagcgccagaccgacgatcacgccgattttcaggaaggtagcgagatagtcgcgcggggcgaggatcagccataccggcagcagcgcggaaacaaaggcgtagccgatcagcgcgaaggtaatggtggtgtctttaaaggtcagcgccgggccccagtaagggtcgtgggcaatcacgccgccgaagtaaatagacgccaccagcagcacgataccaataacggagacttcgcctacgcgtcccggacgcaggaagcgcatgtagatgcccataaacagcgcaatcggcaccgtggagcagacggtgaagacgccccacgggctttcggccagcgctttaaccacgattaatgccagcaccgcgaggatgatgatcatgattaagaagcagccgaacagcgcgatggtgcctggaacggtacccatctcttctttgatcatctcgccaagagaggcgccgttacggcgggaagagatgaacagcaccataaagtcctgcactgcgcccgcgagcaccacgcccgccagtaaccacagtgtccccggcagatagcccatctgcgcggccaataccggcccgaccagcggacctgcgccagcgatggcggcgaagtggtgaccaaacagcacgtagcggttagtcggcacgtagttcaggccgtcgttattgataaccgccggcgtcgcgcgcgtcgggtcgagtttcatgaccttctgggcgatgtacaggctgtagtagcggtaagccaccagatagacggaaacggaagcgaccacgatccacagggcgctcacgtgttcaccccgacgtagggcaacgaccgagaggcagaaagcaccgatgattccgagaatcacccagggtatgtgcttgaatatctttttcgtatccatagtaaaacctggttgtaagtttaattatcagccgaagctgggtggacattgagttcgtgtttgaggaggtagattgactgctatgctgagaggatcttgccagatcatcgcgcgcgtaaagttaggtaaatcagtgagtggttgtatggcggtttaagcggtcggacgtaccggtaagcggtttcgcggaggagggcgtgggctattttatgtgattgagatcacgatataaaatgggacgatccttgttgcgcggggcgtcataacgacttcactgagctaatcgtgatattaatggcgcgcatcccataaagttttccctttccaggccgaaaattctgtatctgtctagcggaaagagaaaacatgttaaagcgaattaaaattgttaccagcttactgctggtattggcgctatttggccttttacaactgacatccggcgggctgttcttcaactcgctgaagaatgacaaagaaaacttcaccgtattgcaaaccattcgtcagcagcagtctgccctgaatgcaacctgggtggagctgttgcaaacgcgtaataccctgaatcgcgcgggtatccgctggatgatggaccagagcaatattggcagcggcgcaactgtcgctgaactgatgcagggggcgaccaatacgctgaagctgaccgaaaaaaactgggcgcagtatgaggcgttaccgcgcgatccacgtcagagtgaagcggctttccttgagatcaaacgaacctatgatatctaccacggcgcgttggcggagcttattcagcttcttggcgcgggtaagattaacgagttttttgatcaaccgactcaaagctatcaggacgcttttgagaagcagtacatggcctatatgcagcaaaacgatcgtctgtacgatattgctgttgaggataacaacagttcctacaaccaggcgatgtgggtactggtcagtgtgctgattgccgttctggtggtcattatcgccgtctggttcggcatcaaactgtcgcttatcgccccgatgaatcgtctgattgaaagcattcgtcatatcgccagcggcgatctggtgaagcgtatcgacgtggaaggctccaacgaaatggggcagttggctgaaaacctgcgtcatatgcaaagtgaactgatgcgtaccgttggcgatgtacgtaacggcgcgaatgcgatctatagcggcgccagcgagattgcgatgggcaacaacgatctctcttcccgtactgagcagcaggcagcgtctctggaagagaccgccgccagtatggaacaactgaccgccaccgtgaaacagaacgccgaaaacgcccgtcaggccagtcacctggcattgagcgcctctgaaacagcgcaaaaaggcggcaaagtggtggataacgtcgtacaaacaatgcgcgatatcgcctccagttcgcagaaaatcgccgatattatcagcgtaatcgacggtattgctttccagaccaatatcctggcgctgaatgcggcggtagaagcggcgcgcgcaggcgagcagggacgcgggttcgcggtggtggccggtgaagtccgtaatctggcccagcggagcgcgcaggcagcgcgggagatcaagagtctgattgaggattccgtgagccgtgttgatgtaggttcgacgctggtcgaaagcgccggtgaaaccatggatgagatcgtcaatgcagtgacccgcgtgaccgatatcatgggcgagattgcctcggcgtctgacgagcaaagccgtggtatcgaccaggtgggcctggcggtagcggagatggatcgcgtaacgcagcagaacgcctcgctggtggaagagtccgccgccgcggctgcggcgctggaagagcaagccagccgtctgacccaggccgtcgcggtgttccgtattcaacagcaacagcagcgtgcgcgtgatgtggctgcggtaaaaaccccggcagccgtgtcgtcaccaaaggccgctgtggccgacggcagcgataattgggaaacgttttaagggcgtatggtgaacagtcggcctacagacgaccgtaggccggatgagatgttcacacttttgcctgatggcgtagcgcttaccaggcctggcagtccgcgcaggccgattttaaaccagcatcaggcgcatggtgcagcgtgattcatacgccaggccgtgcgccgcttccttctctcttttctgatatcgcgcgctaatccaacgttgagtgaaggtgtgcggtgatccacaaaaaatgaataaagcgagagaacgcacggcaggagagccttgtttcgcggcatcataattgctgatgtggtaatcgtgagaggatacgatgcgcaaagatgccctgcttgctttcctgatgaaccaaacggatttttttgatccggaaaatgtcagtgaggtgtttaccgcgcgctatctggcgcagcgttttaatatgcagcgtaataccgccagccattatctgaaccaactggtggcgcagggcgtgctctgcaaaatcaatacccgtcccgtctatttcctgcataagcaggcatttagccaacagttttttaccctttcgcgtaatgaatacgccagcgtcgcggagctgttagcgcacggggaacaggagtgcgcgccggacgatcacttttctctgttgattggtcataacgaaagcctgaagcggccgattgagcaactgaaaaccgcgctgttttatcccgacggcggactgccgctactgatgaccggcgaaagcggcaccgggaaaagttatctggcgcagctcatgcacgaatatgccatcgcccaggcgcttctgtcgccggatgcgccatttatcagttttaattgcgcccagtatgcgagcaatcccgaactgctggctgcgaatctttttggctatgtgaagggcgcgtttaccggcgcgcagagcgacagaccgggcgcgttcgaggcggctgacggcggcatgttatttctggatgaagtccaccggctgagcgccgaagggcaggagaagctctttacctggctcgatcgtggtgaaatttatcgggtaggcgacaccgcgcaggggcatccggtttcggtacgtctggtatttgcgacgaccgaagagatacacagtacctttctgacgacatttttgcgacgcatcccgattcaggtcaacctgccggatctccagcaccgtagccgccaggaaaaagaggcgctgatcttactgtttttctggacggaggcgaaaaaactttcggccacgcttatcctcaaaccgcgtttgttgcagatcctcaatcaatatgtttatcgcggcaacgtcggcgagctgaaaaatgtggtgaagtatgcggtggcgacggcatgggcgaaaaagcctgggcaggaaaccgttaccgtgtcgctgcacgatctgccggatgccatgctgtcggcattgccgtcactgaatgaaccgctggcggacgacacgccggtgagcatctcgcccgacacgaaccttacctggctgctgcgcgcccgcgacgagatgcagggcatgatccatgatacgcagtgtcatgtgctggcgctgtacgagctggtacgtagcgggaaagaggggtgggagacggtacaaaaaagaatgggcgatgaaattgagaccctcttcgatcgcctgatttttaccggcgacgataatgtgcactcacagcggttgctgttaattacaagccaggtgcgggaagagttttatcgtctggagaagcgcttcaatatgcagcttaacggcaactgtatttacgcgcttagccactatttaatccatcgtaccgcactggcgccttctcgtctcaacagcgagcagatccgccaactggacgccttcctcgcccagaaatatccgctactgtacagcttctgtttacaaattctggagacgctgggccagaagctggatctggagccgagacgcattgatatgctgctgctggcgctttggctgcataaacagggggctaacaaccaaaaacaggtgacgcatgcggtgattctggcgcacggctatgccaccgccagcagtatcgccaacgtcgccaaccggctactgaaaaatacgatttttgaatcgttcgatatgccgctggacgtcacgccggaggcgatagcgcagcaggtgatgcgctatctggaagagcatccgctcgcctccggcctgatgattctggtggatatgggatcgctcaaggccattcatcgccattttgatcgcgcgctttccacgccggtgacgattatcaacaacgtctcgaccagcatggccctgtatgtaggggagcgtattttacaggggcattttattgaagagatcgcccgcgatatcgcccgggatgtgccggtcgagtatcagctctactggccgaaaagcaacaaaccgcgcgccatactgaccacctgcgcgaccggtatcggtgtggcgacgaatctttgcgcattgctgagcgccagtattccacaggcgctggagattgacgtcgtcgcctgcgattatgcgatgctggcgaacaataaaacccaggagccggtatttatgcgctacgacgtactggcgatagttggcacgctggacccgcacatcgccagcgtgccgtggatttcgctcgactcgctgatctccggcgaggggaaccactacctgatgcggctgtttggttcgctaaccactccggagcaggtggcggagatcaacaacctgctgctgaaaaatttctcgctccgacgagtgatcgaatccgtcaccatcctcgacaccagcaaagtcatcaaccacgttgagcagtttctgctgcgctatgagcatctggcgggcgttaccgtctcgaatgaaagaaaggtggcgctctatgtgcatattagttgcctgattgagcgtctgatccgccatgcgggcattactgcctggagtgggcaacagtgtccggaacaggaactgaatcggctacgggaagcgtttagtgtcattgagagtaactacagtgtcaaaatccccaccgccgagcttggctatattcataatatcctgaccttcgaaacagaacttatcgagcaagatcaacagttttaactatttccctctgttaacccgcatcttttttcggcgcgccactttttctggcacgccgcttgctctcttttatcacagtggaatgtgttttagaggtcaggatgaagagacattatattttcgccagccacggcacgctggccagcggagttttaaactccgtggagctgattttaggcaaacggtcaaatgtctggacgctgtgcgcttacgttgaagagagcgtggatttaagccagcaggtagatacgctaattgcccggatcccgccggaagatgaaattattgcgctgaccgatatttttgccggcagcgtgaataacgaatttgtccgttatttatcacgggaaaattttcatctgctggcagggattaacctgccgctggttatcgatctctttatgtcggaaaacgatggcaataccacgcataccataatgacggcgttagcggattcaaaagaaaatattcagtactgcaatcaaactatcaccagcgccatgcaaagcgataaagatttttaaggggaggaagcgtcatgattgtttttttacgggtggatcatcgtttattacatggacaggtcgccttttcctggacgcagtacgttggcgcagactgtattttaattgccaacgacagcgtacctaatgatgacctgcgtaaaaccaccattaagatggcgaagccgcccgcggtgaagctggttattaaaaatattgccgattcaattgaagcgataaaaagcggcgttaccgataaatataaactttttattgttgttgaatccgtggcggatgcgtaccggctggcgcgcgaattacccgacattaaaagtattaatttaggcggcacgaaggtacgtgaagggagccagaatattgctaaagccatcaatctgttagcggatgaaatgactcaacttcgggagctggcggctggcggagtagagatagaaattcggctggtgcctaacgatcgtaaacaactttttgcctgagcggataccctcctgaggacatattatggtagaggcgcttttacttggactggtggcgtttatcgcccagtctgaatatgcattagggacgtcgctgatttccagacctatcgtgaccggacttttaaccggactggtgctgggcgacatggaaaccggaattgtgatgggcgcgacgctggagttggcgtttatcggttccttttcggtgggcgcgtcgctgcccccggatgtggtcactggcggtattttaggtgtggcctttgcgattaattccggcgctggggcggaaaccgcgctgttattaggtttgcctatcgcgacactggcgttaattgtgaaaaatatctataacggaatgtttattccgttgctctgtcataaagccgatgcttacgctgaggtgggggatacccggggcattgagcgtatgcatttaatctccggcattgggctgtcgctgatgctggggattatcgtcacggtctcttatttagcgggcgtgaatatggttaaaggttttctggatgccattccagaatttattaaacatggattaagcgttgccaccggtattattcccgcgctgggttttgccatgctggcgcgcttattaattaataaaaaggtcgccccctattttttcctcggttttgttttaatggcgtatttaaaaattccggtgacgggtattgcgattctcggcgcgatcgtcgccgtcgtgatggtcaatataccgaaatttgcggcctcgcaaccggcacctgcgcaaggagcgtctcatgacgatgaagatgatttctgataaagaccgccagcaggcggaaaccactggtctggtcaccgcgcgtgatttacgccgcgtcttctggcggtcattccagatggagttttcctggaactatgaacgacaaatgaacctggcgttcgtctatacgctcattccggtattaaagaaactgtatagccgaaaagaagatcttgccgaagcgctaaaacgccatctggctttctttaataccactccgcacattgtgacgttgatcctcggtattaccgtggcgatggaggagaaaaatagccagcagaaagagatggacgccagttctatcgataacgtcaaagcgtcgttaatggggccgctggcgggtattggcgactcttttttctggggaacattgcgtcttatcgccactggcatcggtaccagtctggcgctgaaaggcaatattctggggccgattttatttctgctggtgtttaacgtaccgcatattctggcccgctggttctttacccgctggggctatgtgctgggaaccggcgtactgcaacgcattcagcaaagcggaatgatggaaagcctaacctatggcgcctcgattatcggtctgatggtggttggcgcgatgacagcctccatgattgatatcaccattcccattacgtttggtacgggagaggcgaaaacccatgttcaggacattattaacgacatcatgccttgtctgctgccgttaattagcttcgccattgtgtactggcttttagggaaaaaagtgaaaccgttaaccatcattggcggtattgcgctggtgggaattttcggttcctggatagggttattttaagagggatacacaatgtcaccaaccatgctgacctatattaacgaagagtctgacgtcctggcgaatattattcgctgccatcgccagtcgctggaagaagtatcgcggttcgccagccaaaaaacgttacgacgaatactgatattagccaccggatcgtcattgaatgccgccttttgcgcccgttatttctttgagcgctgcggtatctctatcgatattaaagagccgtacacctttagccagtatgagaatagcgatccgcaagccgatatggttattgctatttcccagagcgggaaaagcgcttctaccctggaggcgatgcgtaaagttcaggcgcagggacgtccggtattcgctctgaccgccgatccgcaaagccctcttggcaaggccagtgattatccactggatattctgaccgggattgagtccgtcggctttgttacccgtggatttagcgcgacggtactgaatctgttgcttatcgcgttgttagttgcccgtcagcagcagctgacggaatcgcaggtcgaggagtatgtggcgcagcttcaacgcatcgcggcaaccctgccgttggttatcgtgcgtacggaagcgtttattcaccagcaccaggccgttttacgaaacgggacgcgttttgtggcgacaggctacggcgcgctggttggggtggcaaaagagttggaaactaaatttaccgagacggtgcgtgttccctcaagcgggtttgagctggaagcctatatgcacggcccgtatctggaagccaatgcggaacacgtgatgttcttctttgaggaccggcccgacgcgcgctccagggcgctacgggagtatatgacgcctgcggtcgccaaaacctttactctcacgctggcgaaggcggcgcaggatgaccagacgcttgcgctggatgtagcggttgatcaccatttctcgccattactgttgattgtgccggtacaactcatggcgtttcatatcgcctcactgaaaggcatcgacctttcggtacgcatttttgacgatttcgatcgcgttttaaaaagtaaaatctgaacaatcaggagaaaaatatgttgggttttaatcaggacgagtacctgacgagtgctcgtgagatcatcgctgcgcgccagaaggcagaacaggttgctgacgagatttatcaggccgggttcagttctttatttttcgcctctgttggcggttcactggcgccaatgatggcaattaatgaatttgccaaagaattaacaacgttgccggtttatgttgagcaggcggcagaattaattcataaaggaaataagcggctgaataaagactctgtggttattacgctgtctaaatccggcgataccaaagaatcggtggcgatcgccgagtggtgtaaagcacagggaatacgcgtagtcgctattaccaaaaatgcggactctccgctggcgcaggcggcgacatggcatattccgatgcgtcacaaaaatggcgtggaatatgaatatatgttgctgtactggctgtttttccgcgtgctgtcgcgcaataacgaattcgccagttacgatcgcttcgccagccaactggaaattctgccggcgaatctgctgaaagcgaaacaaaaatttgatccgcaggcggacgctatcgccagccgttatcataacagcgattatatgatgtgggtcggcggcgcggagatgtggggcgaggtctatctgttctccatgtgtatcttggaagagatgcagtggaagcgcacgcgccccgtcagctctgcggaatttttccacggcgctctggagctgctggaaaaagacgttccgctcattctggtgaaaggggaagggaaatgccgcgcgctggatgaacgcgttgagcgttttgccagtaaaattaccgataacctggtggtgattgatccgaaagcgtatgcgctggacggcattgatgatgagttccgctggatcatggcgccctgcgtcgtctcgacactgctggttgatcggctggcggcgcacttcgagaaatataccggccacagtctggatattcgtcgctactaccgtcagttcgattattaacagaaaggggcgtgtagcatatacagtgcctgatggcgcttcgcttatcaggcctgtgcgccagtttattgataaagatgatgtgtaggccgggtaaggcgcagccgccacccggcatatatgacattctcttttaactttcaacattcaccactttgatctccaccatgccaatccccaatttgcgcggcgaatggcccaaaatattaccttcgttggtggagacgggagcgggcggcgcaatgactaaggtattcgcgtccgtcgggttgttgaaatgcagcgtgatagtggacacatcgtgacccagcaccagcgtctgttcttcgttgcctacgcgtaccggaatcggccgattcgcgttgtcgccgaaggctttggcggtgatcaccagatcaaactttttcggcagcggcgctttatattcgattttaacctcatcgcccaactgcgcatttgaccagcgcccccaggactccggccgggaaatgccgctaaactgtttcacctcttccggcgcgcccgcgacgttaaagataaaactgtcggctttgtagcgaatgtcgttatcaacaatcttcagtgtatcgacattgccctggtaacgcgtcacgtcgatgaccgtctctttaaacgccgtcttgcctttccactgcgctttatcgacatgctgtacggtttgctgcccgccaagctgcccctgcgagacgcaccagtcggtagagagcgccagcgccggcgcccatagctgcgccattttgtagcagcgatcgatccaaacgaaattatcgcgcggggcgaagtcggccaactggaaccgtagcggagcggagtattcactttccggtaacggctcgacgcgcttatccgatacgcgcagtagtaacggcaggcggaagtggctcccggaaaacgcgatcatgtttttgtcccgatcgacggtaaaatcttttatctctttcgggaaattccacaggcgaatgatatccggcttcatcgccagcactttctcttttacattcaggaacacttccgacagcgactgcccggaaaggctgctacgtcccagaccgataaaattatcgccgccgagaatatccagcaccgttgcgccgttgtccatcgtgttgcgtttgaccgccagcgtctcctgctgtggtttatcgccgcgcagaatgaaaaacagattgttgcgatcttgcttattcaggtatttccaggccgtattattcatcgccagatggtcggaagagacgacgataacggtatctttaaaccacggtgacgctttgattttgttgataaactcggcgatgttttcctggctgcaacttacggcgctaaaggactggttgggcttaccgtcgtaatcgtagcgtttgcggttgcaggtccgcgagataaaaccgtccgggtgatgggtatctacggtcagagtaaacagcgaaaagcgctggcctgagcgggaaagcgcttcaaatttcttccatgcctcatcaagcaccgtatcgtcgtagaagccccagtcgttacgataagacgggtccgccaccaccgtttttagctcttcagcgccgtacagatgatcaaatccgtgtgatttcaggaacacgtctttcccggcaaaacgcaggttagcgccctgcacgaaatagttctggtagccggagtttttcagaatatcgccgaggcagatattctgcgggaagaagctggaaaccgacgcggacgcattgccctcaaacggcgcaaacagcggaataccacactgggaagccaccatcccggcgatggtgtaatccgttcccggcagttgcatggtatggctgaaatccagcccctcatttttcagcgcgcccaactctggcgtgagattggggaacgcgtcattatcaaaataggtccgttccaggctctcgccgtagatatagaccagattgagcttcggattaggaatggtttttgctggttctttataataaacggcaaaatccggatcgccatcgcgcatttgtgattttaccagttcggtaatctggcgaaacgccgggctggcgtcgaccgaacccaacgccagcagtaacgccagcaggctgtaaccgacatgatgaggatggtgacggcggcggcgtagtacccatcccagcgcgccgaataccgccactaacgccagggcaatgccgattcccggcagaatatatttgccgactcccgctcccgtcagactattcgtgagcgtataaagcactgcgtcgttgatcccgtcgccggtaaaatagtcgctggcatacagggtaatattcagaatgacaaaaagtcccagcaccgtgagagtggcggcaaaccaccaggtgttacggcccgccttccaggcatatatcagcacagaggcgagaaacagagcgacagagagcaactcggacaactgacgatcctcaataaaccaggcttatcgctggcaggaaaaaatttctaacaatgtaatagcgatgtcacattgctgcaattctaataactttacacggcgctgttatttagaatgagtttagaaagttggttttttgatcggcatcacttcctgccatagcggttaataacaggaaaagacgaagagaaaaatcgggttaatgccgtgttggcgggtaaagggccaaaacacggcttttatcagggcgtcccggcgtggcgcacggtcagaaaaacgcagtcaggagaggaaattcagcccttgctgcaataccagatcgcaagctttggttttcaccttttccgccagcggcgtactgccgatattattgaggttcaactgctggccgtccttcgtcttgagcaacccttgcaggccgttcaggtagttagtgtcctgctcctgctgtgtggtatccaaccccaacttgttcagaatctgatttttaacgttttccacgttggtagcggacgccagtttctgtttggcgcagtactgcaaaataccggcggcattattcatattatcggcgctgagcgactgggcacctctgctgagcagaccggttagcgcagaaagcgacatcccgccctgctgtgcgttcgcgccctgagcgcttagctgactggcggcaataccgctggtggaaatcagtacgctggcgatcgccgcgcagcacagaacatgtttcgctgtattcatggtaatcacctgtgttatgccagccaggcgtcgtatcgccctggagcacgttgcaatttaatactctttacccgtcacccggctgcggtaactgtcccaggtaaaattaacccataaactgttgccgagacgcatacggtccatgacgcgttcgccaagcattttcgtcatctcttccatattgctgttcgtcaacatgccggtgggacgttttgacgaggaacgacgatcgacaatttgattgatgatcactttttcatagcgggattcggtctgcacgccgatctcgtcgatcaccagcagatcaacgttactcagatcgttaagcaactgctcttcgctggtttcccgattgctgaacgtgtctttcatcgctgacataatatccgctacggtgataatcagtaccgactttccgcgcagcagcagctcgttacaaatagccgcggcgagatggtttttaccggttccaggcttgccggaaaagacaaagctggcgatattgccgtcaaactcatcaacgtactgtcgggctttgcttaacgcgttcatttgtccgtcgcactcaacccgatagttatcaaacgagcagttctgatgcagcggtcgaatgccggaacggttaaaggtgcgctgcattttcatcgcccgattttcccgcgccagcgccgccgccccgatctcgccttgctctttctgccacgccagcagttcttcgcccgttttaaacgccggtgtaatatgcgcaggcatcattttttgtagacgctgcatcaggtcgccaacatttttcatcgttaccccctaaaacctggtggaatatgattgtcaggttcgctgacgctattgatgtcgcgctgcggcattccgccattgctggaacggctgatttgcacgctgcgcgccagcttttgctgccactggatatggtgaaaaaccttaccttccgcctgccagtaggcgataaacgccgccagctcttctgcggtgaccggctcccgaagcgccacgccccaaagggcagcctgacgctgaaaatccgcatccggttgccaggcgggatacatggcgaattttccgcagggaatcgcaacgggggcggcttcgggttcttcgtaaaattgtgcgtctaacgccacatcgcttcccggacgtgataacttttcttcaagcgccagcagttcagccatgcgtgcaggcgtcacggcataaaaggcaggcgcattattagcgaataccgccactgcgccgcccgttgacttcgccagcacagcatgatgatcgtgtaaaagggcgtcaataccgatgacgtccgacgttaaaattctggaagacataatgtttctcaatatggaacaacaaccgagaagggcgactgtttttatagtaccacacagacctgtaagaacagcaggaggcgttctaccattcacacgcgggggcgtttgcggtacagccataatcccggtacagagaggccaattgagagcgcgccaacaatggaagaggctttcagaaaattggtcagcagcgtaatcatcatcggttcgctatagcccagatggctaatttttactgcggaaatcatcgcggtataggcggaaatccccggaaacatcgggatcacggccgcgacggtaaacactttagggtgagcgagataccagcgtgaccactgaataccaatactgccgaccagcagcgaagccataaacgtcgaccattcgatattaaagccagcgctcatcattagcatacgcgagccatgacccagcgcccccagtagcgcgcaccacggaagcgcccggtggggaacattaaagaccatcgcaaacccgacggcggggatcgcagacaagatcatgtcctgcattagcgccagtaaaaagtcgattatacccatcctcgtagcccccatactgtcattgacatcactacgcccacacaggtggctagtgtcaacaggctggcgatagcccagcgcgccagcccggtattaatatgtcctttaaacatatctgcgacggaattaatcagcggaaagcccggcaccagtagcagtacgcttgccgccatggcgatagtgggcgtctggctaaaggcgggaagagtgagcatcagcccggaaatcgtggtagcgacaaaggcggtaatgcaaaaattgatctgcggatgtaaatgccgctgcgccagcatctgacggatatacatggctatcatactggcgaaaaaggtgataaccgcgccatcccagccgccattattcagcttacaaaagcaggagcaggaaagaccgaccataaacgccaccagccagcgcggataacgcagcgggcggagctggctaaagcgtttttccacgcctttgtaatccagcagacgatgttccgcgaggataacgatatgctgaacctccgtgacgacgtgcatattaatgccgcgatcctggtttttacgtgtcgatgtcagacattgtccgtctttaatggtcgtcaggacaatggcgttagaggagatcgcgctttcgacgctatccataccgagcgccaaaccgaggcgggtggaaagctcatcaaccagtgcgctttccgccccgtgctgcaataaaaacagcccgcattgaatacataaccgtgttactgctcgttgaattgattgctcttcttgcatgactcgtcctgtccaaaaagacattctatgcgccgccactatgacagaggcttcctttttaacacgaagcgcaggcatgatggcgttggttaagatcaatttcttgttgataaaaacgtcagccgccagacgcaacgcataagcttcttgagacgtgcgcttcgtcacaggcaggatatccttatgggcgacggttctcgtatgtccgtttccagaatagaggcattatgccagcctggccgctcatttttgaatcaatgatgtggtgaattttatcaacgatatgcattaatggtttaaccacaatggcgtgagcagcgggcgtaaaattaggcatgacttagtgtaattcgcagatattacatgggttttatggattgtagacagtattgttgggcttttgttttaggacttagcaatatgaataaagagcgaactcatattttaaatttattaatatgatgagttttcgttagaattactaatgtgcaaatttagttaatttaattgtcttgcttctggttttatgagtaactatgcgatagtgatttcatgtttttgtgctatgtggattgtagcgcaatcaatgttagatatttaaaaataaaacaaggataattaatccactcggtctatatttctttgcgctcattgttaatagtgtttttattaatggggcaatgaaagggggcggcgtgggtgcggaggaattatgctgccaggatgctgcaaaaatggacttattatcagtaaaacccctcttatacaggaaggccttaaaggggttataacaggtaatttccccgattataaactggcgtattgccgtacgatagaagagctaacgctgctacagctacgccgaagtaatttagttattgctgatttagcagttaacaatgcctctccccgcgctatctgcgaatatttttatagcttactctcgcaatatcgcgacatacattgggtatttctggttcctaaatcctgctatccacatgcagttgatctcctgatgggccccgtcagcaccttgctttcagacgaagagccaatcgagaatcttattagcgttatccatgcgggaaacgctcgctcagaaagaataagcaaaacattattatcgcctcaggtaccgtctgaaattcagcagtcccacgacaggccgattgtccttacgctgtctgaacgaaaagtattacgccttttaggaaaagggtggggcattaaccaaattgcggcgttacttaaaaaaagtaataaaacaattagcgcccaaaaaaatagcgccatgcgacgcttatcaatacacagtaatgcagagatgtatgcatggataaacagttctcagggagccagagaattgaacctaccttcggtatatggagaaaccatggaatggaaaacagaatcagcaagagaaatgttgcgctcgtagaaaaatgcgtgatgagcaccattggtattaaagggctatttgatgcaatgccggattgccgacatacgcttcatattttttcaaaaccatccacgttttataaggctgcgctaaagacgccgttttctgccgttattttttctctttctgcgttaagaactgaacgccggacaggattatccagtctgacggaactggcgataaattatccccatatgcggcgtctggtgattgccgatgatgatgctgaagcccgcttaatcagcgcgctatccccgctgccgctggatggggtcatcagcaaagcgtcgccgttggatgttttacaggatgccttatttacatcgcttaatagcgcccggcggacaacggagcgtacagacaatctttgggaacttcaccagaattgtatgcttagtccaaccgagcgggagattctgcgtttcatgtcgaacggctactcaatgccgcaaattgccgtccagttagaacgtaacattaagactatccgggcgcataagtttaatgtgatgtccaagctgggcgtgagttctgatgccgggttactcgatgcggcggatattctgttatatctgcgcgccggagatgctaccgcgctccagcatcgggtatagcccgcgccggatgcgccgtgcttgttcggggaatccgggggccaggcacgttattggcacacgtctacccaggtcgccgatgtcagttcagccattctttccggcgtgatgcgtaccgcgctgtgcgtggcgcctgcggcaggcaatacttcgttataccccttcagagagatgtcgcaataaacgggcagcgggtgctccagcccgaaaggacatacgccgccgacaggatgtccggttgcattgaccacttcatcgctgctcaacatacgggcttttgcgccgaaagtggttttaagcttcttattatccaggcgggcatcgcctttcgcgaccaccaggataatggtgtcttttactttaagcgagagcgttttagctatctgccctggctctacgttgtgcgctttggctgccagctcgacagtcgctgtactttgatttaattcgataatttcaatatcgggagcatgatcggccagaaattgccgtacagattgcagactcattcttctctcctgagaccttactaccttactaatagccacggtagacccaaaaatggcaaaacgtaatttggcatacggagagcgccgctgtaaatataataatgtgacaggccagcagcagtaagccgtgacgataactgaaggcaacgtaacgcggtttactttagcgtgcagtcgccgcactgttgtacgtcaggtaagcggtaacgttggcagcaggttctgcgtaccagaagaccgtcgcgcattacgacggtccgccacagcgggttatcctgaccgtcggatagctgcttttcaaaaaaacagcgctggcgtagcgttgccagcagggcttcgccaagcagcggtttcatctcagtcagataccagttgattaaataaccggtattgctccagataagtttcgcgttgatgtagccagtcgcctccagcgcctgaatgaccggctgtagtgcggagactattagcgtttccattcgttcttccggggaacgctccgttgccaggttatcctgatgcacatcaagccagaaacacgcggcgcgcccggtttcatgaaattcaacgtgaatatgttctgccgagacattgatagcgcgcgcttgcgtcagtaatgccagcatcagcggcggcgccatcagcccgatataccattgcgcccacagggagagtaacggcttattttcacgtggcaggcctggcgtgtgtcgatagatgtgatcggaataggcggccagcaatgaacgaaacgtcgcggggcgcgtccactgggcaagagtcatcgccgttggcggcggcgtttcatccagccggatgaagtccaacaggtgcttacgggtagaggcgatcgtctcgcgtactgcgtccgccagcgaggcgtcttccggctggggagcagctcgccagataatatcgtcagcaatcggtgcggaacggtaggccatagcgcagtttaatgatgttaatctaaatgataatgattgctaatcctatcgatagcgataaacgatggcaagcggtttatggttaacgctgttggcgtagcacgattacgtcagcaggattcatagggcgcgcatgtcgtcgctgaccagaatgtggttacgtccaagatgcttggcttcgtagagcgctttatccgctttttcgatagcgtctccgatattgcgatccgtcaggggcgcaatgccgatactgacagtgacattggtggcgacgctttcgttaaacatatgcgggattttaagatcgtatacttcctgtcggatacgttctgcggtagcgcgggcttgctgtggttcggcggtggtcagcaacaccagaaattcttccccgccaaaacggcagacgacatcgcgcgatcgcacggcgtcccgaattgccgctgagacgcggattaacgcctgatcgcccatcatatgaccgtagtgatcgttatacgctttgaaatgatcgatatccaatagcaggacgtagtgttcatggctgcccggcgcctgtaacgtatccagccgattttgcaggccacggcggttatataagccggttaatggatcaagcatgctcaggccattgagggtttcccgctcggccagcagcttaaacatgagctgttgggcaaagttatcgtagcgtttctggataacatgttgaatagcgattcccaccattggcagggccagcaaatagagaattcgcaaaccttgttcattatcgttcagccacaggcagaccgcgactggcggtagcgaatagagcgtaaacgcgacgatattcgcggcaaaggctatcgagccgataaacagaacgctaagcagggaaatcagtaaaaaagagaaatcataatggcctaacgccggatactttagcgcaatatgcgccgcccatattcccccaaagagtagggagataaaggggagattaattcttttttgtccatatttcccatgccatatcaacagtaatacgctcaggaccactatcccgatcattggcgtgcaaaatacattgatctgataaagggggaaaacgagagtaaatagcgccgacacggcgttgagaaacaagaaaagacgtaaagaaaactgatacttcttaatacgaagcgaccgccaggatggtgttgtcatgggtaattgtcgttatttatcggtgatatacacggaatcgggcgccaacatgaaaataacgtatgagaaaaggtcgcctaaagcgaggtgttgttgtttttacgttaacagtcggacaatttatcaccttactgaatacgtgtcatcaaccgttaagtaaaactcatctctttagctttcactctggctgacaaatgagaaaatatatcatatgatattggttatcattatcaattccagaggtgaaaccatgttgcagcggacgttaggcagcggatggggcgtattattgcctggagtgattatcgttggactggcgtttatcggcctgtcagctgatgcgctgaagctgttgattgtatcaggattgctactgtctgcgctgatgttgtatcacaaacaattacggcattttgtactgctgccatcgtgtatagcgcttattggcggcatgatgttggcaatgacgaactggaatcagggatgaaaatgaagagacaaaggaaggataagataattggtgcgaggggggggacttgaacccccacgtccgtaaggacactaacacctgaagctagcgcgtctaccaattccgccaccttcgcacagttatcttactttttgatatcgcctcgttggtgcgaggggggggacttgaacccccacgtccgtaagaacactaacacctgaagctagcgcgtctaccaattccgccaccttcgcccagtgcgagcaatatcaacgtggttttggtgcgaggggggggacttgaacccccacgtccgtaaggacactaacacctgaagctagcgcgtctaccaattccgccaccttcgcataccatcgattcttgaaaagaatcactaccacggaggcgcattctagtggttttcagctattcgtcaatagttaattgcatgggatagattgattgctgcaaaaatgggcgcgagacgtaggttggataagacgctttgcgtcgccatccggcacatgcaaccagatggcgctgcgcttatcaggccaactatttcttcgcctgacgggtcatcacggtacgataaaccttaaagcgcccggtttgcgcgatgacttcatggaagccaaaagtctcatccagaatcttaggatagggcagaaaggcgttcgccacgatgcgtaactccccgccgctgttcagatggcgcactgcgccgcgaatgagcgtttgcgccgcatcgaggctggtttgcattccgtcgtggaacggcgggttggagatgatcatgtcaaaacgtcctttgacttccgaaaagacgttgctggcgaatacctcgccttcaagaccattagcggcaagcgtggcgcggctggcttccaccgccggagcgctgacgtcacacagcgtcaggcgcactttcggcgaatggctggccagcgcggcggaaagcacgccagcgccgcagccgacatccagcactttacctttggtgtgcggcgtcagcgtagacagcagcagttggctaccaacatccagtccgtcgcggctgaatacgcccggcaacgttttgatggtcagcccgtcgatgttgtactcggcccaccaggattcaagactaaactgcggctgcttttccagacggccatggtaaaggccgcaacgtcgcgcgctatctactttgttcagcggcgcatagtccgccagcatcggttcggcgctacgcacgccgctgcggttttctcccacgacgaaaacatcgacgcccgacggcatcagcgacaaaatattcatcaactggaactgcgcttcgggtttatttttcggccagtagtagatcagcgtatcgcagtcggcgacatcgctggcttgcgcgaccaggctaaaacggacgttatcgcccatctggcggcttaatacctgccagtggtgaaactgttgcgtatgcgcgcggctggcggcgcattcaaagcgcgcgggcaggtcatcctgcaaatctccggcaaaaagaatacggctttgttcgaaatcatcactgtggcgcagcaagacttcacttgccggggtaaaagcagacatggaatgctccttaattcagactggcggcgattatagtagtttgatggcggagattcgacagatttgctatatttgcgcccctgattacaggagcgtttcgctatgacatcccgacgagactggcagttacagcaactgggtattacgcagtgggcgctgcgacgtcctggcgcgctacagggcgagattgcgatttcccttcccgcgcacgttcgtctgatcgtggttgcagaggaattacccgcgctgaacgagccgctaatgcgcgatattttacgcgcgttgaccgtgagtcccgatcaggttttacccctggcgcctgagcgcgtcgccatgctgccgcagggcagccgttgtaatagctggcggttaggaactgacgcgccgctccaactcgaaggcgctcaggtcacgacgccggcgtttaatgaactccgggcaaacccggcggcacgcgccgcactatggcaacaaatctgcgaacatgaacacgatttctatcctcagcacgaccgatctccccgcagcctggcagattgagcaacgcgctcatgcgtttccgtggagcgaaaaaacgtttttcggcaacctgggtgaacggtatctcaaccttaagctgaccgctgatgacagaatggccgcgtttgccattacacaggtggtgctggacgaagcgacgctgttcaatattgccgtcgatccggattttcagcgtcgggggctggggcgtatgctgcttgagcatctgattgatgaactggaaaaacgtggggttgtaacgctatggctggaggtacgcgcctctaacgctgccgccatcgcgctgtatgaaagtctggggtttaacgaggcgacgattcgccgcaattactatcccacggcacaagggcatgaggacgccatcatcatggcgttaccgataagcatgtaataaaagaggcaaggtgtaatgatgaagtgggactggattttctttgatgccgatgaaacgctgtttacgtttgattctttcaccggcttacagcggatgttccttgactatagcgtcacctttaccgctgaggatttccaggattaccaggccgtgaataagccgctatgggtagattatcagaacggcgcgattacctcattacaattgcagcacgcgcgttttcaaagttgggctgaacggctaaacgttgcgccggggctgctgaatgacgcttttattagtgcgatggcggagatctgttctcctttgccgggcgccgtttcgctacttaatgcgattcgcgggcaggctaaaatcggtattattactaacggttttaccgcgctacaacaaactcgtctggagcgcaccgggctgcgcgagtatttcgatctgctggtgatttccgagcaggttggcgtcgcgaagcccgatccgaaaatctttaactacgccctggagcaggcggggaatcctgaccgctcgcgcgtattaatggttggcgataccgcggaatccgatattcttggcggcattaacgccgggctgtcgacctgctggcttaacgcgcatcatcgcgagcagcccgcgggtattcatccaacctggactgtggcgtcattaagcgaactggagcagctcctgtgtaaacactgattgcctcccccaggttgatgggtaaaatagccgcatttttcgtattcaacatgcgtggtcaaacgccgcgcttactcaagaagatttgactatgacgttgtctccttatttgcaagaggtggccaaacgccgcacttttgccattatttctcacccggacgccggtaaaaccaccattaccgaaaaagtgttgctgttcggacaggcgattcagaccgccggtacggtaaaaggccgtggctccagccaacatgcaaaatctgactggatggagatggaaaaacagcgtggtatctccatcaccacctcggtgatgcagttcccatatcacgactgtctggtgaacctgctggacaccccggggcacgaagacttctccgaagatacctaccgtaccctgacggcggtggactgctgtctgatggtgatcgacgccgcaaaaggcgttgaagacaggactcgtaagctgatggaagttacccgtctgcgcgatacgccgatcctgacctttatgaacaaactcgaccgtgacatccgcgacccgatggagctgctggatgaagtggaaaatgagctgaaaatcggctgcgcgccgatcacctggccgattggctgcggcaagctgtttaagggcgtttatcacctttataaagatgaaacttatctgtatcagaccggtaagggccacaccattcaggaagtgcgcatcgttaaagggctgaataacccggatctggacgccgccgtcggtgaagacctggcgcaacagctgcgcgacgagctggaactggtgcagggcgcgtctaacgagtttgatgaagagctgttcctggcaggggaaattaccccggtatttttcggtaccgcgctgggtaactttggcgttgaccatatgctggatggtttagtggcgtgggcgcccgcgccgatgccgcgtcaaaccgatacccgcacagtggaagcctcggaagagaaattcaccggttttgtctttaaaattcaggccaatatggacccgaaacaccgcgaccgcgtggcgtttatgcgcgtggtttccggtaagtatgagaagggcatgaagttacgccaggtccgtaccggcaaagatgtggtgatttccgacgcgttaacatttatggcgggcgatcgttcgcacgttgaagaagcgtacccgggcgatattttgggtctgcataaccacggcaccattcagatcggcgataccttcacccagggcgagatgatgaagtttaccggtatcccgaactttgcgccggaactgttccgtcgtattcgcctgaaagatccgctcaagcagaagcagctactgaaagggctggtgcagctttctgaagagggggcggttcaggtattccgtcccatctccaacaacgatctgattgtcggcgccgtgggcgttttgcagtttgacgttgttgtcgcgcgcctgaaaagcgaatacaacgttgaggcgatttatgaatccgtcaacgtggcgacggcgcgctgggtggaaagcgccgatgcgaagaaattcgaagagtttaagcgtaagaatgaaacgcagctggcgctggatggcggcgacaacctcacctatatcgcccccacgatggttaacctgaacctgacccaggaacgttaccctgacgttcagttccgtaaaacgcgcgaacactgatccctttccgggcgcggcatccgccgcgccttcgtactttccctgcctttttaaccgcttacggaatgttcttaaatcccgcgttttttctccgatctgcctgttttttatacgcaccgacaagcgattttaaaattgtgatctatatttaacaaagtgatgacataaatgtcggctttaatgcctgttcaatgcgtgaatatgagagcttaaagctgagatttgtttcagtcacgatattaataactgaaacggaagggtggcaggcgacgcgtcgttacaaattcacgaatgtgatgccagtcattgacttcagaaaccggtgagtttcaccgcattcagcaatgcaacctcgtgttgcctgagctcaaattacgagcaaactatacaggacaaaatcgatgactatgacaagactgaagatttctaaaactctgctggccgtaatgttgacctctgctgttgcgacaggttctgcctttgcagaaaacgcaacaacggacaaggcgcaaagcggaaccgaaaccgcagggcaaaaagtcgatagctctatgaataaagtcggtaacttcatggatgacagcgccatcactgcgaaagtaaaagctgcgctggtagaccatgacaatattaaaagcaccgatatttctgtcgaaaccaatcagaaagtcgtcaccctgagcggctttgtagaaagccaggcgcaggctgaagccgccgtgaaagtggcgaaaggcgtagaaggcgtgacctccgttagcgacaaacttcacgttcgcgacaataaagaaggttccgtgaaaggctatgccggcgatacggccacgaccagtgaagtcaaagccaagttgctggcggacgatcttgtcccttcccgtaaagtgaaagtagaaacgaccgatggcgtcgtacagctctccggtaccgttgaaactcaggaacaaagcgaccgcgctgaaagcatcgcgaaagccgttgatggcgtaaaaagtgttaaaaacgatctgaaagttcagtaattcgtcgtaattcgtcctcccgacgtttgtcgggaggcgtaatgtgcaccacactaaaaatatcgcgaatgagtagcctgagcgctcatatttagcggtcgacattaactatggtaaaggagaggcttatgtttcgttggggcattatatttctggttatcgcgttaattgccgccgcattgggttttggtggactggctggtacggctgccggcgcggcgaaaatcgtcttcgtcgtcgggatcgtgctcttcctggtcagcctgttcatgggccgtaaacgaccctagcaggcatctgtaaagatatattgctatcaagccagtccagcggactggcttttacggttttagccgttaacgttttgcgttaccttgtcagcctggaaaaaaatgaaaaataggaaggcagaggtgggccagcgaataccggttacgctcggcaatattgcgccgttatcattaacaccgttccggccaggccgtatggcgctggtctgtgagggcggggggcagcggggtatctttaccgcaggcgtgctggatgagtttatgcgtgcgcagtttaatcctttccatctctacttcggcacatcagccggtgcgcaaaatctctcggcgtatctctgcaaccagcccggctacgggcgtaaagtcattatgcgctataccaccaggcgcgaattttttgatccgctgcgatttgtacgcggaggaaaccttatcgacctcgactggctggtggaatccaccgccgcccggatgccgctgcaaatggataccgcagcgcgcctgtttgacagcggaaaatccttttatatgtgcgcctgccggggggatgattacacgccgggctatttctcgccgacaaaacaaaactggcttgatatcattcgcgcctccagcgccataccgggtttctaccgtaccggcgttacgttagagggcatcaactatctggacggtggcattagcgacgccattccggttcaggaggcggcaaagcggggggcgaaaaccattgtggtgatccgcaccgtaccctcgcaaatgtattacacgccgcagtggtttaagcgtatggagcgctggctgggagagagcagtctacagccgttggtcaacctggtgcagcatcatgaaacgtcctacagcgcgatccaacaatttattgaaaagccgccgggtaagctgcggatcattgaaatttatccgccgaaaccgctgcacagcatggcgctgggcagccgtatcccggcgctgcgtgaggattacaaaaccgggcaattatgcgggcgttatttccttgccaccgttggtaaattgctcgccgcaacgccgcctctcttgcgccattcgtcgcggattgccgtgccggaaacggtggtcgtgcctccggcgccggtggccaatgatacgcatgtggcggaggtcattagcgcgccgcaggcaaacgacaccacatttaccgacgaggatctggcgtgagctggcgctttatcgatacgcattgccattttgatttcccgccctttacgggcgatgagcgcgccagtattcagcgtgcctgtgaggcgggcgttgaaaaaatcatcgtgccggcgaccgaggcggctcactttccccgcgtgctggcgctggcggcgcgtttcccgtcgctttatgctgcgctgggattataccccattgtgattgagcgtcatgccgatgacgatcctgataagctgcaacaagcgctggcgcaacaacagaacgtcgtggcggtaggcgagatcgggctcgatctttatcgcgacgatccgcagtttgccaggcaagagcgatttttagacgtgcaactgcaactggcaaaacgctacgatctgccggtgatcctgcactcgcggcgcacgcatgacaaactggcgatgcacttaaagcgccaggatctgccgcgaaccggtgtggtgcatggttttgccggcagtctgcagcaggccgaacgctttgtgcgactgggctataaaatcggcgtcggcggcaccatcacctacccgcgcgccagtaaaacccgtgatgttatggcgcggttgccgctggacgcgctgttgctggagaccgatgcgccggatatgccgctaaaggggtttcaggggcagccgaaccgcccggagcaggcggcgcgcgtatttgatgcgctctgcgaattacgtccggagcccgcagaggtgatagccgatacgctgtatcgcaataccattaccttgtttcggctctgatggcatcgcagccgccgtccggcaggcgacgcttacaaatatagcgccggcaaaatcagcttcgccaccccacgcgcgcgcaatccgtcagccagccgttccacctcttgcggcgtcgcgcctggccaggccttcgcttcgccatagacgccatgcgcatgaaaggcattcaaacgcaccggaacctcgcccagcgaagtaataaacgccgccagtgaatcaatatgcgccgcatagtccacctgattcgggataaccagcaaccgcagctccgccagttttccccgcgcagcaagaaagcggatactgtgcttaatatgcgtgttatcacgtccggtcagacggtgatgacactcgctcttccaggctttcagatcgagcattacgccgtcgcaaaccggcagtagtttttgccagccggtctcgcttaactgaccattactgtccaccagacaggtcagccgttgtaactgcggatcggctttgatcgccgtaaatagcgccacaataaacggtaattgcgtggtcgcctctccgccgctgacggtaataccttcaataaacagcgatgctttacgaatatgacgcagcacatcgtcaacgctcatggtctgcgccattggcgttgcctgctgtgggcacattttcaggcaggtatcgcactgctcgcagacgtccgaccgccataccactttcccgccatcaacgctgagggcgtgatgcggacactgcgatacgcattccccgcagtcgttacagcgtcccatcgtccacgggttatggcaattcttgcagcgcaaattgcagccctgtaagaataatgccaggcggctgcctggcccatcgacgcaggaaaacgcaatgatcttactgactaaagcgcatctgttgttcatggctgactacgcgtggctgtcgttccaggatgcgggtattacgtgcggcttcttctcccagccaggtggtattcgtgcgcgagccttcggcgcgaaatttcgccagatccgacaggcgcaccatataaccggtgacgcgcaccagatcgttgccgctgacattggcagtaaattcccgcatcccggctttgaacgcgccaagacaaagctgaaccagcgcctgcggattacgcttgatggtttcgtccagcgtcagaatgtcgctgatcccggcatggtaaaaggcatggtgcggcgcgacggtttgcaaatgggtgatagggtccggttcatcgccatacggcagacgcgcgcccggcgtagtgccgatatcggaactgatgccagactgggcatggagcagcgcccgttgcttccagccatacttcactggcgtattttcgacgaaatccgccagttgggcgctgatacggtagcccagctcgttcgccgtttcattcttgccgtaacgggcgttcaggcccgcgttttcgcacagcagattcacggcttccgccagcccgtacataccgaacatcggcgcaaaacgttcgggatcgatcaaaccttcctgtacaagaaagctattctcaaagaaatgtgacttttcatagaggaattcacatcgtgaattaatgatggcgatctgctgtcggcagtagtgcggtagcgtgcgtgaaaagaagtcatcgacagacgtactgcgttctgccacggctttcaggttgagacgtaccagcgtactgccgccgccgccaagcggtagcgagttataacaactgacgatgccataatgcccttttgtgaaaattttatcatttacagggccgttggaaatgtgtggcttactgcattcgcaaatgtttttggcgacctccagcagcagatcgtccggcgtaatttccgcatcgtagataaacgtcaggttaggcgtcacctgctttagctcggcatcagcgcgcaaaatcgctcgtgtgacaggcgtatcggcagggccaatattggcatgcataaaggcgtctggcagcgttctgtcgagataacgccagaaacgttttattcgaatatcgatcgcatcttgtgttagaattctaacatatggttgcagcaacgcatcaagctggccgagataaaccggcatggacgtcacggaaggaacgtgatgatacagaatggtgagtagggataacgcatcatccagatctttcgcgccttccagttccagccactgtgaaccgttagccagaaatcgggcgtaatcgggcaacacgtagcgcggtttgaagggggcgtgcccctcaaacatatcgcaaatgacaccttcatccagcgcctggcgggcatcttccggcagggggggataaggcagggcgttttcagcttccagcgccagaaaatggcgtttttgttcaggcgtgagcaccgggctggtcacaatttgctggcaacgctgctggagcgcagtttcgcatgaggcaggcatcttcgtttcctctttatgccgggacgatgcgctattgtagaaaatggcggcaaaccgactttgatcctgatgcgcttatcgctcgaagaacagacggtgacggcgggataatttgattcagatctcattacagtaatgcaaatttgtacgtagttttcattaactgtgatgtatatcgaagtgtaaacgcgagtgaatgttagaatattaacagactcgcaaggtgaaattttatacggcaatgccgttggagaatgtcatgactgatttaaaagcaagcagcctgcgtgcgctcaaactgatggatctgaccactctgaacgatgacgacaccaatgaaaaagtgatcgcgttgtgtcatcaggcaaaaactccggtcgggaatacggcggcgatttgtatttacccgcgttttatcccgattgcgcgtaaaactctgaaagaacaaggtacgccggacatccgcattgcaacggtgactaacttcccgcatggcaatgatgacatcgatattgcgctggcggaaacccgtgcggcgatcgcctacggcgctgacgaagtggacgtggtattcccgtaccgcgcgttgatcgccggtaacgagcaggtgggttttgacctggtaaaagcctgtaaagacgcttgtgccgcagcgaacgtattgctgaaagtgatcatcgaaactggcgagctgaaagaagaggcgctgattcgtaaagcctctgaaatctccattaaagccggtgcggatttcatcaaaacctctaccggtaaagtgccggtaaacgctacgccggaaagcgcgcgcatcatgatggaagtgatccgcgacatgggcgtttccaaaaccgttggcttcaaaccggcgggcggcgtacgtacggcggaagacgcgcagaaattcctcgcgattgcagacgaactgtttggcgctgactgggcagattctcgtcactaccgctttggcgcatccagcctgctggcaagcctgctgaaagcgctgggtcacggcgacggtaagagcgccagcagctactaagctctgatttgccggatggcgctgcgcttatccggcctacaaatccaggcctgtaggccggataaggcgttagccgccatccggcgatgtaagccttctactcttttccctcaggagggtaccgtgtttctcgcacaagaaattattcgtaaaaagcgtgatggtcatgcgttgagtgacgaagaaattcgtttctttattaatggtattcgtgacaatactatctctgaagggcagattgccgccctggcgatgaccatcttcttccacgatatgaccatgccggagcgtgtttcgctgaccatggcgatgcgggattccggtactgtccttgactggaaaagcctgaatctcaatggcccgattgtcgataagcattcgaccggcggcgtaggggacgtgacgtctctgatgttggggccaatggtagcggcctgcggcggttatgtgccgatgatctccggtcgcggtctcggacataccggcggtacgctcgacaaactggaagcgatcccgggcttcgacatcttcccggacgacaaccgtttccgcgaaattattcaagacgtgggtgtggcgattattgggcaaaccagctcgcttgcaccggcggacaaacgtttttacgccacccgcgatattaccgcgacggtggactctattccgctgatcactggttccatcctcgccaagaaactggccgaagggctggatgcgctggtaatggacgtcaaagtcggcagtggcgcgtttatgccaacctatgaactttctgaagcccttgctgaagcgattgttggcgtggcaaacggcgcgggagttcgcactacggctttgttaaccgatatgaaccaggtgctggcttcgagcgccggtaacgcggtggaagtgcgtgaagccgtgcagttcctgaccggagaataccgcaatccgcgcttgtttgacgttaccatggcgctatgcgtggagatgctgatctccggccagctggcgaaagacgacgccgaagcgcgtgcgaaattacaggcggtgctggataacggtaaagcggcagaagtctttggtcgtatggtggccgcgcagaaagggccaagcgatttcgttgagaactacgataaatacttgccgaccgccatgttgagcaaagcggtatatgctgataccgaagggtttatcagcgcaatggatacgcgtgcgctggggatggcggtcgtctcgatgggcggcggccgtcgtcaggcgtcagataccattgattacagcgttggctttaccgacatggcccgtctgggcgacagcatcgacgggcagcgcccgctggcggtgattcatgccaaagacgaagccagttggcaggaagcggcgaaggccgtcaaagcggcaattatccttgacgataaagcgccagcaagcacaccttcggtctatcgtcgaattactgaatagttgtatactgatctgatcaattatttttgaagcactaagtacggagaagatatgaaacgtgcatttattatggtgctggactcattcggcatcggcgctactgaagacgcggatcgttttggcgacgtaggttccgacactctgggccacatcgcagaagcttgcgccaaaggcgaagctgacaatggccgtaaaggcccgttgaatctgcctaacctgactcgtctggggctggtgaaagcgcatgaaggctctaccggtaaaattgccgccggcatggacggcaacgcggacgttattggcgcatacgcatgggcgcacgaactgtcctccggcaaagatacgccgtcaggccactgggaaatcgccggtgtgccggtactgttcgactggggctatttcagcgaccacgaaaacagcttcccgcaggaactgctggataagctggtgaaacgcgccaacctgccgggctatctcggtaactgccactcttccggcaccgttattctggaccagctcggcgaagagcacatgaaaaccggcaagccgattttctacacctccgctgactccgtgttccagattgcctgccacgaagagacctttggcctggataaactctacgagctgtgcgaaatcgcccgtgaagagctgaccgaaggcggctataacattggccgcgtgatcgcgcgtccgtttatcggcgacaaggccggtaacttccagcgtaccggtaaccgtcacgacctggccgttgaaccgccagcgccgaccgtgctgcagaaactggtcgatgaaaaacagggccacgtggtgtccgtcggtaagattgccgacatctacgccaactgcggcatcactaagaaagtgaaagcgaccggtctggacgcgctgttcgacgcgaccctcaaagagatgaaagaagcgggcgataaaaccatcgttttcactaacttcgttgacttcgactcttcctggggccaccgtcgcgacatcgcgggctacgccgcaggtctggagctgtttgaccgccgtctgccggagctgatggagctggtgggtgaagatgacattctgatcctgaccgctgaccacggctgtgacccgagctggaccggtactgaccatacccgtgagcacattccggtgctgatctacggtccgaaagtcaaaccgggctctttaggtcaccgtgaaaccttcgcggatatcggccagacgctggcgacctactttggcacatcgccgatggactacggtaaaaacatgctgtgatacctgttgtctttcgcgctgtagatgcgttgacttcattcgctcaccccggtcacatagttaatctatgctcccggggattcacgaattcgtcgccttcctgcaacgcgaaatccttagggtatttcactgttttgacacacgttttgtaggcctgataaggcgtagccgccatcaggcaataacaacaaatttaaagggaactgaagatggcaactccacatattaatgcagaaatgggtgatttcgctgacgtcgtattgatgccgggcgacccgctgcgtgcgaagcacattgctgagactttcctcgaagatgttcgcgaagtgaacaacgttcgcggcatgttaggtttcaccgggacttacaaaggacgtaagatctccgtgatgggccacggtatgggtatcccgtcctgctccatctacaccaaagagctgatcaccgatttcggcgtgaagaaaatcattcgcgtcggctcctgcggcgctgtgcgcatggacgtcaaactgcgcgacgtggtgatcggtatgggtgcctgcaccgactccaaagtgaaccgtatccgctttaaagatcatgactttgcggctatcgctgacttcgacatggtacgtaacgcagttgatgcggcaaaagcgctgggcgttgacgcgcgcgtaggcaacctgttctccgctgacctgttctactctccggacggcgaaatgttcgacgtgatggaaaaatacggcgtactgggcgtagagatggaagcggcgggtatctacggcgttgcggctgaatttggcgcgaaagcgctgactatctgcaccgtgtccgaccatatccgtacccacgagcagaccactgccgctgagcgacagacgaccttcaacgacatgatcaaaatcgcgctggaatctgtgctgctgggcgaccaggagtaagcagcaaatcgacccggacgaggtgcgtcaaggcctggtccgggtaatgccagcgttatatccactctcttctgataatctattcatctttcctctcgctctctctttgtttgtattgacaatcaaagggctgtgtccttaaatccattcaagtatctattcattaatctattcatctatgagcgcattaaccgatttgctcttacaggggccgagttccgccgctgaattaagatcatcgctggccgttagtcaggcgacgttctctcgtctggtttccgcgcatcaggacgtcatccagtttggtaaagctcgtgctacgcgctacgcgcttgttcggcctgttcgcggcgtcgcggcctttcccctctggcaggtcaatgcacaaggacaggccgctaagtttggcgttctttatccgtgttggcctcaggggagttgcctggttgcgcttgatacaggtgaatggcaatggtttgacagcctgccatggtatctgaccgatcttaggccacaaggattccttgggcgagcctggggaaggaccgtggctgggtatgcgcatctgcctgatgacatccggttgtggcaagaggatgaagtcctgtatgcgctgcgggcgtatcagggtgaaaatgcgggcggctggatcgtgggtgaggagaattaccagcgttgggtgaccgcgccggatgcgacggcgattacgcagtccgaaaaactcaatcgctatcagcaattggcggaagacgcgctcgcaggtgaggtcatcggctcttcagctggtggtgagcagcctaaatttgcctgttttgcagaaacaagatggggcaatcagaacgtactggtgaaattcagcgcgcgtgcaaggaacaccgtttctgaacgctggagcgacctcttgattgccgagtccatcgcattagccgtgctttctgccgccagcatcaacgccagcttagccacggctatttgcagcgagggaggacaggtctttctggaaagcattcgcttcgactgcaccgggatacgtggtcgtcggcaaattgtttccctggaggcgttgcaaggcgagtatgcatcttcgccaggcatctggccggtggtcacgcatcggcttgccgggcagggcattatagatgctgttgcccatcagcaaattgagaaaatttgggcgtttggtcggcttatcgccaacagcgatatgcatgcgggtaacctctcgttttattactccgatgccccgatggcgctcgcgcctgtctatgatatgttgccgatggcttacgctccggcggcatcgggcatgttgcgctacgcgcctgtcgacattcgtgtggaggccacaatcgataagaaagcgtgggaatttgccttgccgttggccgagcgcttttgggtgctggtcgctgatgataaacgcatcagcgcgggctttcaggagattgcccgcgcgatggtgggaaaattgaagttagccgcgcagaccatcgggcggctggcgtagacgcttagcgtacagcttgagccatccacgcagccagttcccgcagctcacctttctgagccgggaattcagcaattaaagattcgcaggcctgctccaacacatccactcgatactggcagccttgtaaacgctcgcctaaggcttccagcggtgccgggttcaggctatcggtaaacacctgcgcacgggtaatcacacctttctcgacgtcaaaatgcagctcgacgccgccccaggtgaaacgttcgtccagtagatggctgaacgccggtgcctggccgaaattccactcccaactgctctggcgcgcaaaggtttcggcaaaattcggcagatccggcgttttatccggtgaaatcacttccgcgtcgacgcgttcgccgtaatgggcgaaaaaggcttccgtcaccgcctggcagacctgttcatgggtgatacccggtaatagctcggtaagattggccacgcgggagcgaacggaggtgattcctttcgccgcaagcttctttttatcgggattcagatagtttgccagacggctgaggtctgcattcagcagcagcgtaccgtgatggaagccgcgatctttggtttcgcgataggctgaaccggagactttgcgatcgccgtccggcgtttttacgaccagatcgttgcgtcccgaagcatcggccatgacccccagcgaattcagcgccgcgagcacaatatgggtggagatggttttatcgtattccggtttaccggccataaaggtaaaacaggtattaccgaggtcatggaataccgcgccgccgccgctgctacggcgggccagacggacattatcttcttccatacgccgcgtattacactctttccacgggttttgcgcgcgtccaatgaccaccgtatccgcgttgcgccacaggaacagcacgcgctgggtggcgggcatctggcggaaaatgcactcctcgaccgccaggttaaaccagggatcgtaagagtcagaaataagcaggcgtaatgttgtcatagtggttttccttacctttattaagccgtcattttactctttttcctcacgctcttcctcttccggaacaggcttgctggccgttagcaggaagggcgactgctgccagcgggtgcgtttaccttgtagcaaggtgcgcgtcagcaccacgcctatcgccagcgagagtagcagcatcaggcgtagaatgttggtggtgttatcgacctgctttgcttcggtggccagcgtgtgggtatccagcgtcagacgcaggtagcccaatgggccgtttttcccctggataggctcgacaatttgttggttaaaatagctgcccgcttttttgccatccagcgccagcctgtcgcgcacgttgacgctttcgccagcgcgagtaataagatcgccctgttcatcatagacgccggcatccagaatacggctctcttgcgtgagctgacgcagcacggcgttgatgcgattttcatccggtgtttcgctgcgcatcagcggggcgatgttgagcgtcacctggcgcgctagcgtgcgggccagctcttccaactgcggattgcgctgtcgctggtggttttgactaaaccatgaagcgccctgcatgagcgcgacgagcagtgtgagacagaacaatacaatgactgcacgatgcagccgaaatttcagttttgcgcgagccatattccacctgctgaaaatttgaggcttaatgttgccagaagcgatggttacaaggtagcctcatgcgttattttccgcggggcggttaccggcctgaacgatttacaggagctttaatgcctaacattacctggtgcgatctgcctgaagatgtctctttatggcctggtttgcctctttctttaagcggcgacgaggtgatgcctctggattaccatgcaggccgcagcggttggctgctgtatgggcgcgggctggataagcagcgtttaactcaatatcagaccaaactgggcgccgcaatggtgattgtcgccgcctggtgcgtggaggattatcaggtcattcgtctggcggggtcgctgacgccgcgtgcgacgcggctggcgcatgaggcgcagctggatgttgcgccgctgggtaaaattccgcatctgcgcacgccggggctgctggtcatggatatggattccacggcgatccagattgagtgtatcgatgaaatcgcgaagctggccggtaccggtgagaaggtggctgaagtgacggagcgcgcgatgcgcggcgagcttgattttaccgccagcctgcgcagccgcgtggcgacgctgaaaggcgcggatgccgatattttgcgccaggtgcgcgggaatctgccgctaatgccaggattaacgcagttggtgctaaaactggaagcgctcggctggaaaatcgctatcgcctccggcggcttcactttcttcgccgactatctgcgtgaccagctacgcctgacggcggcggtcgccaatgagctggagatcatggacggtaaatttaccggtcacgttatcggcgatattgtggatgctgagtataaagccaataccttgcttcgtctggcgcaagagcatgacatcccgctggcgcagacggtggcgattggcgacggcgctaacgatctgccaatgatcaaagcggcagggttaggtattgccttccatgccaagccaaaagtaaacgaaaagacggagattacgatccgccacgctgacctgatgggcgtgttttgcattctctccggcagcatgaaccagaaatgattaacctgcccaatggcaaggcgaccgtaggccggataagcgtcagcgccatccggcaacagcgttaacgaaagaggtaaaacgtggcaaaagctcccaaacgcgcctttgtttgtaatgaatgcggggccgattacccgcgctggcaggggcaatgcagcgcctgccatgcctggaacaccattaccgaggtgcgccttgccgcgtcgccgacggtggcgcgtaacgaacgtctgagcggatacgccggcagtgcgggcgtatcaaaagtgcagaaactgtctgacatcagtcttgaggaactgccgcgcttttctaccggttttaaagagtttgaccgcgtgctgggcggcggggtggtacccggcagcgccattttgattggcggtaaccccggcgcgggcaaatcaacgttgctgctgcaaacgctgtgcaagctcgccgagcagatgaaagcactgtacgtcaccggcgaagagtcgctacagcaggtggcgatgcgcgcgcaccgtctcggcctgccgaccgctaatctgaatatgctctccgaaaccagcatcgagcagatctgcctgatagcggaagaagaacagccgaaactgatggtgatcgactccatacaggtgatgcatatggcggacatccagtcgtcgccaggcagcgtcgcccaggtccgcgaaacggcagcctacctgacgcgcttcgccaaaacgcgcggcgtggcgatcgtgatggtcggccacgtcaccaaagacgggtcgctggccgggccgaaagtgctggaacactgtatcgattgctcagtattgctcgacggcgacgccgattctcgttttcgcacgctgcgcagccacaaaaaccgctttggcgcagtcaatgagctgggcgtcttcgccatgaccgaacaggggttgcgcgaagtgagcaatccgtccgccatctttttaagccgcggcgatgaggtcacttccggcagttcagtgatggtcgtctgggaaggcacgcgaccgttgctggtggagattcaggcgctggtcgatcactcgatgatggcgaaccccagacgcgtggcggtcggtctggaacaaaaccgtctggctatcctgctggcggtgctgcaccgacacggcggtctacaaatgtcggatcaggacgtcttcgtcaacgtggtcggcggcgtgaaagtcaccgaaaccagcgcggatctggctttactgctggcgatggtctccagcctgcgtgacaggccgttgccgcaggatctggtggtgtttggcgaagtggggctggcaggcgagattcgtccggtgccgagcgggcaggagcgtatttccgaggcggcgaaacacggttttcgtcgggcgattgtgcctgccgccaacgtaccgaaaaagccgccggaaggaatgcaggtgttcggtgttaaaaagctcgcagatgcgttaagcgtgtttgacgacttataattctctgtatgtagtgatgttgtataatttgccggatggcgacgcaatgcgtcttatccggcctacggattgatacggattgatgttgtaggcctgataagcgaagcgccatcaggcagtgttatgcgatttttccagcaggaggctcttgtgtcatcgttcgactatctcaaaaccgcgattaagcagcaaggttgcactctgcaacaggtggctgacgccagcggtatgaccaaggggtatctgagtcagttacttaacgccaaaatcaaaagccccagcgcgcaaaaactggaggcgctacaccgttttctcgggctggagtttccccgccgacagaaaaacattggcgtggtgttcggtaaattttatccattgcataccggacacatctacttgatccagcgcgcctgtagccaggtggatgagttgcatatcattatgggatatgacgatacgcgcgaccgcgggctgtttgaggatagcgccatgtcgcagcagcccaccgtgtcggatcgcctgcgctggttgctgcaaaccttcaaataccaaaaaaatattcgcatccacgcctttaatgaagaggggatggagccttatccgcatggctgggacgtctggagcaacggcattaaagcgtttatggcagagaagggaatacagccgagctggatctacacttccgaagaggctgatgcgccgcagtatcttgagcatttagggattgagacggtgctggtcgatcctgaacgcacgtttatgaatatcagcggggcgcaaatccgcgaaaatccgtttcgttactgggaatatattcctacagaagtgaagccgtttttcgtgcgtaccgtcgcgattctgggcggggaatcaagcggcaagtctacgctggtcaataagctcgccaatatttttaataccaccagcgcctgggaatatggccgcgactatgttttttcgcatctgggcggcgatgagatggcgttacagtattccgactacgataaaattgcgctgggccatgcgcaatatattgatttcgcagtgaaatatgcgaataaagtggcgtttatcgataccgatttcgtcaccacccaggcattttgcaaaaaatacgaagggcgcgagcatccctttgtccaggcgctgatcgacgagtatcgcttcgacctggtgattttgctggagaataatacgccgtgggtagctgacggactgcgaagcctgggcagttcagtggatcgtaaagcgttccagagcctattggtcgagatgctgaaagagaacaacattgagttcgttcacgttaaagaggctgattacgatggccgctttttgcgctgtgtggaactggtgaaagagatgatgggcgagcagggataagaaccaatgcctgatgcgacgcttaccgcgtcttatcaggcctacagtttcacaacgtattggaatcgctggttttgtaggccgggtaagcgcaagcgccacccggcattcagacgtttatttggcaatacgcttgtacttgatacgcttcggctccagcgcctcggcgcccagcgtgcgtttcttgtactcttcgtattcggtaaagttgccttcgaagaattccaccttaccttcatcctgataatccagaatgtgggtggcgatacggtcaaggaaccaacggtcgtgcgagataaccatcgcgcagccagggaactccagcagggcgttttccagcgcgcgcagggtttcgatatccaggtcgttcgtcggttcgtcgagcagcaggacgttaccgcccacctgcagcagcttcgccagatgcaaacgaccgcgctcaccgccggacagttcgccaacgcgtttgccctgatcgacgcctttgaagttgaagcggcctacataggcgcggcttggcatttcagtgttgccgatcttcatgatatccagcccgccggacacttcttcccagacggttttgctgttgtccatcgcgtcgcggaactgatcgaccgaggccagcttgacggtttcacccagcgtaatggtgccgctatcaggctgctcctgaccggacatcatgcggaacagggtcgatttacccgcgccgtttggcccgatgatcccgacgatagcgcctttcggtaccgagaagctcaggtcatcgatcagtacgcggtcgccgtaggatttacgcaggttgctgacttcaatgactttgtcgcccagacgcggtcctggtggaataaacagttcgttggtttcgttacgtttctgatactcaacgctgttcagttcttcaaagcgagccagacgcgccttacctttcgactgacggcctttcgcgccctgacgcacccactccagctctttctcaatggatttacggcgcgccgcttcggcagacgcttcctgcgccagacgctgatctttctgctccagccaggaggagtagttgccttcccacggaataccttcgccgcggtcaagttccagaatccagccggcgacgttatcgaggaagtaacggtcgtgggtaatcgccacgacggtaccttcgaagtcgtgcaggaaacgttccagccacgcaacagattcggcatccaggtggttggtgggttcgtcgagcagcagcatgtccggcttttccagcaacagacggcacagcgccacgcgacggcgctcgccgccggacagtttttcgactttggcatcccagtccggcagacgcagagcgtcagcagcgcgctcaagctgcacgttcagattatgaccgtcgtgcgcctggataatctcttcaagccggccctgctctgcggccagcttgtcgaagtcggcatccggatcggcgtacagcgcgtacacttcatccagacgtttgagggcgttaaccacttccgaaacggcctcttcaatcgactcgcgtaccgtgtgttccgggtttagctgaggttcctgcggcaggtagccaatcttaatgccgggctgcgggcgcgcttcgccctcgatatctttatcgagacccgccatgatgcgcagcagggtagacttaccggcgccgttaaggcccagcacgccgattttggcgccagggaagaagctcagcgagatgtttttcagaatatgacgtttcggcggaaccactttgccgacacgatgcatggtataaacgaattgagccacgttggacttcgcctctatgtttatcgtgatggtgaatagatgtcaaaggcgaagtgtagcctttttccctgcctaagcccagccagcagatcgcactcgcaataaaagtaaaaaagtgtccgtaacgtggcgcaaatggctatgactggttagcataaattcattacgcggcatgatgctgcattggataacaattgaggaagtgcttgtggatagagccaaaccatttgtctggcgtctcgtcgccgccagcgtatgcctgctgaccttttgtcacctcgcgcgggccgactcactggaagagcagcgtaaccgctatgcgcagattaagcaggcctgggacaaccgccagatggatgtggtagagcagatgatgccgggtctgaaagattatccgctctacccgtatctggaataccgtaagatcaccgacgatttgatgaaccaaccggcgattgccgtcacgcagtttgtgcgcgccaatcctacgcttccgcctgcgcgtacgctgcaatcacgcttcgtcaatgagctggcgcgtcgtgaagactggcgcggcttgctggcgtttagcccggagaaacccggcaccacggaagcgcaatgtaactattactacgcgaaatggagtaccgggcaaacggaagcggcctggcagggcgcgaaagacctttggctgaccggcaaaagtcagccgaatgcctgcgataaactgttcagcgtctggcgggcctccggcaagcaagacccgctggcgtacctggaacgtattcggttggcgatgaaagccggaaatacgggtctggttacggtgctggccggacagatgccggcggaatatcaaacgatcgcctcagcgatcattaccctcgctaatgaccctaataacgtgttgaccttcgcacgcaccaccggcgccaccgattttacccgccagatggcggaagtcgcgtttgccagcgtcgcccgccaggacgcggaaaatgcgcgtctgatgatcccctcgctggtacaggcgcagaaacttaatgaggaacaaacgcaggcgctgcgcgatatcgttgcctggcgactgatgggcaacgatgtgaccgatgcgcaagcgaaatggcgcgatgacgcgattatgcgctcgcaatcgacgtcgcttatcgagcggcgcgtgcgtatggcgctggggatgggcgatcgtcgcggtctcaatacctggcttgcccgactgccaatggaggcgaaagagaaagacgagtggcgttactggcaggcggatttattgctggagcgcggtcgtgacgccgaagcgaaagagatccttcatgctttaatgcagaagcgcggtttttatccgatggtcgcggcgcagcgtttaggcgaagagtacacgcttaaaatcgataaagcgcccgccaacgtaaacagcgcgttgacgcaggggccggagatggcgcgtgtacgggagctgatgtactggaacctggataacacggcgcgcagcgaatgggcgaatctggtaaaaagccgtagtaaatctgaacaggcgcagctggcgcgctatgcgtttaaccagcactggtgggatctgagcgtacaggcgacgatcgccggaaaactgtgggatcatctggaggagcgtttcccgctggcgtataacgatctttttacccgctatacccgcggaaaagatatctcacaaagctatgccatggcgattgcccgccaggagagcgcctggaacccgaaagtaaaatcgccggtaggggccagcggcttaatgcagattatgccgggaacggccacccatacggtgaaaatgttttcgattccggactaccgcggccccggccaactgctggagccggagaccaacatcaacattggcaccagctatttgcagtatgtctatcagcagtttggtaataaccgtattttcgcctcggcggcgtataacgccgggccggggcgcgtgcgcacctggcttggcaatagcgccgggcgtatcgatgccgtagcgtttgtcgaaagcattcccttttcggaaacgcgcggctacgtgaaaaacgttctggcctatgacgcttactatcgccactttatggggcagaaagaggccttaatgagcgactctgagtggcagcgacggtattaatgcagacgggttatgttatcatttgtactcgtgtaacagtacaaacggcggtataacatgacccagcgttccccttattcatcggctatcgccgaacaacgtaatcaggagtggcttcgttttgtggagttactccgtcaggcatatgcagaggatctgcatctgcctttattacaactgatgcttacgccggacgagcgtgaagcgctgggaacgcgcgtgcgcattattgaggagttgttgcgtggcgaaatgagccagcgcgagttgaaaaccgagctgggggcgggcatcgccaccatcacgcgcgggtcaaacagcctgaaatccgcgccggttgaactgcgtcattggcttgagaacgtactgctgaaaaacgcctgatttgctcgtaggccggataaggcgaagcggccatccggcaacatcgccgcgaaatgcctgatggcgctgtgcttatcaggcttacaatatagcgcaaataattatcgatacaccgcgttatgaaacgggctgagcgccaggatcaccgcctggtagtaaacgctggagcgcgttaattttccggcggtaaatacgccaatggcgccctctttgcgaccaatctcgtcaataccggtatagtgggacatcaccgggccaagcgcttctccctggcggactctgtcgagaatgacggcgggcagcggcagcgtggccgatcgcgcttcaccgcgctgaacgccgttatcaatcaccacccaactgaaggtggcgtcatcgtcaattccggcttcaatggctacccagaaatcagcttgtggatgcaggcgtcgcgcattatccacgcgatttcgtgcgccagcacgcgtttcctcgcttccgaagggctgctccggtacgccgctctcgacggcgacgggcgtaatatggcacgatccttcgccgaaaatctcttcaaatgcctgtagaattgcctgaattttggcaggattggtggtcgcagagataacctggtgcataattaagctcagttttaaaaatttatcgcagtataacggaaaaaaaacatgttacaggtataccttgttcgccacggtgaaacgcagtggaacgccgagcgacgcattcagggccaatcggacagtcccctgacagcaaaaggcgagcagcaggccatgcaggtaggagaacgcgcccgcagcctcggcatcacccatatcatcagcagcgatttaggccgcacaaaacgcacggcggagattatcgcccaggcgtgcgggtgtgatattacctttgactcccgcctgcgcgagctggatatgggcgtgctggaaaagcgccagatcgattcgctgacggaagaagaagagggctggcgtcgtcagttagtcaacggcacgcaggatggccgcattcccggtggggaatcgatgcaggagttgagcgatcgcgttcatgccgcgctggcgtcctgtctggagctaccgcagggcagccgacctttattggtcagtcacggtatcgcgttgggctgtctggtcagtactatactgggactacccgcctgggcggaacgccggttacgtttgcgcaactgctctatttcccgcatcgattaccaggaaagccagtggctggcgtctgggtgggtggtagaaaccgcaggggacgtttcgcatctggacgcccctgcattggatgagctacagcgttaacgacgaatcgggatcagaaattcgcagcgcaggttgatagggcgatcgccggttttggtatcttctgacggatagtatcgctctatatcctgccctttacgacgggtcagattcagcattggcatacaggtgccgtaaacggtcaggataaaatcctgcacgccggttcctaacccttcataggtgaacatgacgtattcaccgccctgcaacagcacaggatgcgccgactgaacatagccatcggcctgctcttgcggcagtgcggtggtatagaatacttcctgctcatcgtctttctccatgctggggcgcgtttcattaagcccataaagcactggcggaatagttggcgaatgaccgaggaaatcatgccagaattgcacgcgcatttcgtggcggaagtcggaaatctgttccagcgagcaggaatagctctgcgtgacgccaaggagcggcgtatcttccagcgtaacgaactgatgttccggcacggtaaactcgcccagccgtaatggcgggcgaatgccaaaggcgctccattccgaggagcgacgatacagcgctggcgtctgggaaaactgtttcttaaaggcgcgcgtaaaggtttgctgagaatcgaagcggtactgaagagcaatatccagaattggacgcgcggtcaaacgcagcgccactgctgatttcgataaacgacgggcgcggatgtaagcgccaatggcgtggcccgtcacgtccttaaacattctctgcaggtgccacttggaatagcctgcttttgccgccacattgtcaagtgacagcggctgatccagatgaccttccagccagattaacaggtcgcgaattatgccagcctgatccataaaatatccccatcctttcaacaacgagcacccgatatcaggtaagaggataatagcattttttgttcttttagcattcagtgttttttttgagcttaaatgctttttttaggcaacgtgacaggtaattattctaatcctgtgatctataaccattttattttagaatgtctaataattacgcaacgtaacttttatgaatggtaacaatatgaaatacaagagcttagtacttttctcaattttgttgctgctggggcagagcgcccgcgcggaacaaattggttcagtcgatacggtatttaaaatgttcggtcctgaccataaaatcgtggtggaagcttttgacgatcctgatgtcaaaaacgtgacgtgctatgttagccgggcgaaaacgggcggcataaaaggcggattggggctggcggaagatacgtctgacgccgccatctcttgtcagcaggtcgggcctattgaactgagcgacaaaattaagaacggcaaggcgcagggagaagtggtgttcaaaaaacgcacctcattgatatttaagtcattgcaggtcgtgcgtttctatgatgagaaacgcaacacgctggcgtatctggcctactccgacaaagtagtcgacgggtcgccgaagaacgccatcagcgcggtgccggtcatgccgtggcgacaataatagggaaagagtatgcagcaaccgcaggtctggttagtcgaggatgaacagggaatcgccgatacgctcatctacaccctgcaactggaagggtttaccgttgagctattcgctcgcgggctgcctgcgctggaaaaagcgcgtcagcaacggccggatgcggtgattctcgatgtgggactaccggatatcagcggctttgagctgtgtcggcagttgctggaacgccatcctgcgctgccgattcttttcctgactgcccgtagcgatgaagtggatcgattgcttggtctggagatcggcgcagatgattatgtcgccaagccattctcgccgcgcgaagtgagtgcccgcgtgcgcacgctgctgcgccgggtgaaaaagtttgctgcgccgtcgccggtggtgcgtaccggacattttgaactcaatgaaccggcggcgcagatcgcctggtttggtacgccgctctcgctgacgcgttatgagtttctgcttcttaaaaccctgctgctgtcgccggagcgcgtgtactcgcgtcagcaattgatggatattgtctggtctgatgcccaggagaccttcgatcggacggtcgatacacacatcaaaaccctgcgcgctaagctacgcgcgatcaacccggatctctcgccaattaacacgcatcgtggaatgggatacagcctgaggagcgtctgatgcgcatcggaatgcgtttgctgctgggctactttcttattgtcgccgtcgccgccgtgtttgtgctgtctatctttgttcaggagataaagccgggcgtccgccgcgcgacggaagggacgctgattgacaccgcaacgctgctggcggcgctggcccgcgacgatctcctttccggcaacccgactgacggccagctggcgaaggcattcgcccaactgcaacatcgcccgtttcgcgccaatatcagcgggatcgtcaaagtgcgcaatgaataccatgtctacatgacggatgcacaggggaaggtgttgtttgattcggaaaacaaagcggtggggcaggattattctcgctggaatgacgtctggcttacgctgcgcggacagtatggcgcccgcagcacggcaaaagattctgccgatcccaatagcaccgtgatgtacgtagccgcgccgataatcagcgatggacggattatcggcgtcctgtctgtcggtaaaccgaatgcggcaatggcgccggtgattaagcgcagcgaacggcgcattctatgggccagcgccgttttactggggattgcgctggcgattggcgcggggatggtctggtggattaaccgctccatcgcccggttgacgcgctatgcggattccgtcaccgaaaaccgcccacttgcgttacctgcattaggcagcagcgagctgcgtaaactggcgcaggcgctggagagtatgcgcattaagctggaaggcaagaatgacattgagcagtacgtgtatgcgttgactcatgagctgaaaagtccgctggcggcgatacgcggcgcggcggagattctgcgtgaaggaccgcccgcggatgtggttacccgctttacagagaatatactggcgcaaaatacgcgaatgcaggcgctggtagagaccctgctgcgccaggcgcggctggaaaaccggcaggatatccctctcgcgctggttgctgttgatgaactatttacgcagcttagcgaggcgcgcagcattcagttggcggcaaaaaatatcacccttactctacggccttcctcgctggttgtcgtcgccgacgcggagcttctggcgcaggcgctgggcaatgtgttggacaatgctatcgactttacgcctgaaaatggcgttatcacattaagcgctcagccgatgggggagaaagcgatcctgcaggtgacggattccggctgtggtattcctgattttgcgctgccgcgcattttcgaccgattctattcgttgccccgtgaaaacggacgtaaaagcagcgggcttgggctggcgtttgtcagcgaggcggcgcggctcctcaacggtgaggtgacgttgtgcaaccgtcccgaaggcggcgtgctggcctcgttgacacttcaccgtcacttcacataacttcaaattctccccacatcgcgttcttacactgctggcattgcaaaggagaacgctatgttgaaatcccccctgttgtggaaaatgattacgttaggcggcgccatgatcctgctgttaattcccctgatgatggtacggcacaccatcgtggagcgtgctgattatcgaagccatgtggagaatgctattcgtcagagtaccagcggcccacaaaaggttgtcggcccgctggtggcgattccggtgacagagctctataccgtgctggaagaggagaaagaggtccagtataagcgcagctatctctatttttggctgccggagtcgctattggtcgaaggcaatcaaaacgttgaagcgcgaaaaataggtatttatcaggggcaggtgtggcataccgatatggcgataaaggcggagtttgatgtggcccgtctgcatgagctgaacagaccgaacattacccttggaaagccctttatcgtcgtgggcgtcggcgatgcgcgcggtatcagcgcagtaaaagcgccgcaggtcaatggtgaaacgctcactgtagaaccggggaccggcttaccggaaagtagagagggcattcatatcccgctgccggacagtcagtgggcgacgcgcaacctgacgttggcgatgtcgctaaatttaagcggaaccggcagcttttcactggttcccgtcgggcgtagcagtgaaatgaccctgaccagcaactggccgcacccaaattttgtgggggattttcttcccggtaaacgcgaaatcagcggttcaggatttcaggcccagtggcaaaccagccggtttgccacgaatctcggcgaacagtttgctgatgcgcaaaaggtggattgggacaacttaccagcgtttagcgtcgctgtatcgacgccagccgaccagtatcaactgacggacagagcgacgaaatatgccattttgttgattacgctaacgtttatggctttctttgtcttcgaaaccctgacggggcagcggttacacccgatgcagtatctgctggtggggttatcgctggtgatgttctacctgctgttgctggcactgtcggaacatatcggtttcacgccagcctggatcgccgcaagcctggtgggcgcgttgatgaatagcgtttatttgcaggcggtgctgaaaggatggcgcaatagcgtactgtttacgttagcgttattggcgctggatggcgtgatgtggggattgctgcgttcggaagatagctcgttgcttctgggtaccggcgttctgctactggcgcttggcggcgtgatgttcctgacgcgccatctggactggtattcgctctcttgtcagcaacgtaagtcattaccgccagtaaaagatgacgaattacgtttgtggaaataaatataacgggcgcgcgcgttaacgttttcccgcgcagcgccagaaaatgtgatgccgttagttataggtcaggtttaatgttgccgtggcattcgcttgcccggccgttaccgtggcggcggttttatagtagcgcgcgctaattttcagggtggtcgacatattcatggttccgccgttaaccgtctggctgccatcggcattggtggtaatcgtgtgagtaaagagatcaattttttgattgattggcaaactgtcggtaaagaaaccggcgtccggcgcctgaatacccaactgtacgccaacgccggttgcgctggttggcgcgctcgcattgctcaactggatgactgaattatcagggttatttccgctggcaggctgggcgcttaacgatgcggaaatagcggtgccttgttcgcaggtcaataagatatcctgctcgcctgtgcccgccgtttgactgttagcgaaactgcctaaattgacgctgcctaaatcaacggtgatggcaggtgtttctacccgacatcccatcgctttcataatcaattgcgtattccccaaatacagatgggtcaggatatcgccgccggagtcttccgttgcgctatcgcgaaaagatacgcgcgccagtggactttggaatgtcgcggtaccggaggtgatcggaccgcctaaggcgaccagttcaacattgtaggcgggagccatcgcatggtgtgttttattgccatcgccattatggtaggtattatcgattggcatgacattatcgtaagggccagcattcgtttgggttttaatcgcaacgcccacgccggaaatcccggtgctaaataccggcgtgttgttcccgtcattcgcattgattgtcgctgatgtatttgactgcgcgctaccgggttcatataaaaatccgaccttataatcgcgactacagccatccattgtgacttcggaggtggaaacccagcccgattgccacaacacctcgcctgcggtataggcgtggctatccaccacaagctgcgacggcggggtgatagtgatcgcgccttcattaccggaacgtttacaggaggcgtaactatgaccggaatacgcgaacagcagaataagcgccagatataaccttctcatgaaaaattcctgcttttataccaggtgaaatagaaagatgttattgccatgcaatagtgatcgtcacaacggacgtgaaatcccctgccgtgacttttccatacggggtatacatccttgcggcgacaggcaaattggcttcatgggtattactgttgatatccaccgtgtaagtgacgttgttggccagattgaccagacttttaccgtccaggttaaaaagctgtaatcctaaatcctgcgccggattggccgcgctgtttgcataaatcgcagaagcataatttggatcgggataaggtacgccgttaaatgaaatcgcggcttttgtggtcgttgccgggcaattcgtcatttttatggtgaaaggaatggtggcggtattgccgccggccacggcgatatccgcccgggcatattgtccaagagagagcgtgtcggggaccgtcacggtacacggatcggcataaattaatcccgtaacgttaatgtctacggcatctgcggtattgtatgccgcgctgatcgatggcgaccataatgccagacccgtgaacgttaacagggcggctaatgcagcaaatctgttcatattcatcttttatcccaccagaatcactggcattgctcgtgtaagatttctacgccagaagcggagggggagctcggtatacgataagagacctgacaccggtctgctgctgttggtccccacttcactaataaccgcccttgtttttccagtccggttaaccaggcttgccccgcatcaccaacaaaactgctgtgattgtctggttttgttaaagacgagacggtcgcgccaaaaggaacaggaagattgtttatgcgggttaataccatcaatgccttgtaaccaatattggttttatattcagccctgaccaccgcgccacgggtaggcaccagcgttttactggtatcaatgagctcaatattttttctaatgcccgtcgtatctaaagagacttcattacgatggtaaggcgaagcataaggtacgacggcataaccccgaaaatcggtgtccacgcccgtttcgttattcacggggacacccgctgcgccaggggctttaaccaatatgatggtgtcgtccattggctgggatagtgtcaggccatttcgatgtaacagtacgccgccctgaacgccataattcaggcgacgcatatgattatcgtagctatatccgccgttaatatccgcatacgtcccgttataggttgcgctcacattaccgctggtggctttctcttgagaggaataaccttcctgaacgctccatgagagatttttctgtgccagcgctgttccgtttaaaccgacagtatgcgtggtatcgccgtctttcgcggagttcatattgtaggtggcatacgttgacggcataaaggcatctaacggaatgctaatattgattgaaatttgctggtcattactgtcttccgtatcgtcgtcttcatcctgagaattatcggcgttcagcgtataagaatagttaatgccatagcttacgttatgccatgtgttgttatagccaatacctaatgatgtggtatgagtgtcattccagtaatcttcattatataaagtgagtgaaatggaaccgtagataatgtcttgcgataacgacaggtcggtgcgattacgtacatgatcatagtgactattatcgctataggtatccagcacatcctcaagagcgtagtaatctttggtcgaataacggtagccggcgacagtgaaattggtacctgttgactgaatatctttgctgtaacgaatacgccaggattgtccggtaagcgtatcgctaaccacatcgcctgctttaatttttgaccatgagttggtgacgtctaaagacaatgcgcccagatcgccaaggtttaagcctgtcccgatgagcgccgcatgataaacatcattgctcagcgtactctctattccgccataggcggttatgccgcctgctaatccgtataaggccgtcagttcagcgaagttctgttgcgcggaatgcgtatctgatgaacgcgtgcggcctaccgtcaggtcgtatttcaggtggccttcacgctgtaataccggaacgctggcgtagggcacaatgaaatgctgttcagaaccatcggattctttgatggtgacgtacaggtcgcccgaaccgccggttggataaagatcgttgatggcgaatggacccgccggaacgttagttttgtagatggtataaccgttttgttcaacggttacctgcgcgctgcttttggccaccccgcgaatgaccggggcgaaccctttcatactgtccggcaacatatcgtcatcagaagagatctgtacgcccttaaatgaaatactgtcaaagacgtctgcgggcgtgttattttccccggcgatcagctgtccttttaaaaattcgatatcgcgagaaacataggtgtaggcagaatcccagctattttgcccatcgctatcatgattccaggttgagtagttacgaaaacgccatgcgccaatgttaataccagggcgcaggttagcgtattcgctattttccgtccggttttcatcaatatcgtgatcctgcgatccggtaaaactgtagttcagcaaaaaagcattaatgccttcatcccattcgctggtagggacgaattctcgcgggtcggcgatcaacgcgatttgagggatcgctaaatccagccggttaccgatgacattaaactttgctacagcgccagccagcagactaagatcggtacacccgtttgggtcatttttaagctcggggaagttttctgtttttacgccccactgcttgagttgttcaacgctaagacacggctgtagggagagcttattatctgctgattttttatttttaaaggcaatattttttgtttcaacactggtgttattaatataaatatcaacattataggtgccttctgcctgcccccccttttcgaaaaccgatagatcgacattctccacgcccggttcatcattttccaacgataatggattaaaatgatcatgcgctaacgctggttttatggaacagcatataaagagaaacgataacgctaattgagaacggggctctactctggagaattgcacagtaaaagtcctgaaagggtaaaagtaaagtgaagtcgttaatggctagaatgaaccggaatgcggctctaaactcatcccataatcgctgattaatcgccacgttaccgtgccatgaggggcggcagtagaacccaatttaaatgacgctgatgattttggcggaacgaaggtcgctgatttcacttcatggctgttaagcgtcacactggcaaagttcatataatagggagtggggttatttacggtaataacatcacctgccgtctgccattttaattgttggctctggctatcaggcgttgattttgttaatgctggcggtcgatatataagctttatttgggtattaatggagatttccacgcggttcgcggaggcattatcatcaatagaaggaatacccttaatattgagccagtacatagattcccgatctgcaggtaggggggcgccagagcgaataacccgaatactgttcttttgcccggcatcaaggcgaaaaagaggcggggtgataataaacgcctgcttatttgtgacctggggatcggcaaccgataaccatgactgaacaagattcgctttgctgtctttattctctacattgattgacgactcatcattattgccgtcgaaaaccagtcgggttccgccaacaacaatgctggcatgggcaacatggcttgtcagtaatacgaccaacacggatttctttatgtgtttcattttttactctgtaaagatgttttacgctatggactggcatcctgcctgtccacatcaggatgagaatgccttactgatacgaaacggtatacgtaacctgagtgctaacatctccaccggttacggttgcggaaccatcgtttgccatggcggcgtaatagataaagtctgctttcgagccgtcggttggcaggtttactgcagcatcatccgtgttatctgtcacatcgctatgtgaggcgttctgaatagaaataccgacacccgcggcgcccgtttccgatccttcgtccgcgtttttgaagtacgttgggttggaatcatccgttgcgccgtggaagcggaacatggcctgggttggtacgccagtccctgcttccgggcagctaaccaggcttacggtaaacggcacgtaatcggttgtggcgcctttttccgcgatgcgttctttgctgtaattgcctaaatcaatggtggtatccgtggagccattaacctgaaccgtacacgcctgatcgtaaattttgccattgaacgtaatcgtgttctgggcaaataccggtgtggatgctacggcagttaacattgccaggatgataattttcttattaaacatattaattgttgcctgattctattcgctgaaaaataaagatagctatataaaataaaatattatattttactctgtatgcgcttctttctgttctgtagataagcaggcggctattctacgtatatcaactatgaactcaataaaaattctgatgcaatattgaacggcagtccagtttcggacccggtaacaaagtttaataaaataccactaaagaagtatggttgatgactagatttatagagcaagatctcttttttgataatagttattatttcctggaggatttatttaactctatattgctttatttttaagaatatacgacgcttgtccgtttaaaatgaaaccggcaggtttcgaagctctaacagtcttccatgcagtatttttatatagtctcccgcttttagttctgaaagtacctgcatgatacggctgcgtgaaagcccggttctctgttgtatgaagttctgtgcgttgatctcaaatcgtgagctttcaggatacgaccacagttcaagtaacagcgcttttatctggctataggcgtcctgcccgataaggtttctgtcacggttagtcatgaaagcaatgcggtacatcaggatgttcgaaatgtcacgccagagatgcttttcatcggctatttccacaaaatcttttactgggacaggataatattcacaggtggtttcggcgataaaaaagacgtctgaattctcttctaactggtataagtcagcataggcatctacaaggcctaaaatcattggtgagacaccgcagcccattacaatgctgtcgatacgccgacatactttaatagcgcctttagtgattaacaggatgtgggattgattatcaatcttgatatccagtgttttaccggccgtaatagtgacaggggagatgttttgaataacgtgccgatgaatatttaaaatggcttgcaggtttttttctttccctgtgggacgatacacattcccgccgtttaactgcttcatatcttccccattattatggctgataaagtggttgactattaaaaggtaaacataaatttaatattcacttaaaattataattaagtaaattaaaatagccaacaagaatatttaagtcaatgtattcaccttatcaatgcatgagcgacaacgctgtttgtaaggttaaccatagtaaatgtgatgattttatttgcaatcattttatgacagctatcataggtaccgtgcttaacgagcgtgtagagcgtacaggatagcgaagcgatgaacatcgctgttgtaggatacgaatgagagaaaagtacaaaatgcaggcgggcggcgttttactgagcgaaatcgccgcctgccggaactcctcccggcgggagccataagcggttagcggtactggacgatcagactttgaatctccggatgatcttttaacgacacgtgccgtaccgtggcgattccattcatcaacgaaatagcgtttccagacggtgtggcgactgtctgcaaatgggggatattattccgcaaacatgatacctcgatattgcgatcgtgaggcgcaagattacaaccatattcgacaatctggcctttgaaatgaataacgcctgcggagaccggcgcggtagcagccagcgcggctgatgaagctgacatcgctgcacaaaacaggtagcagcataatggtgattttttcatcctgtgaaacctcacgtcctgtgagcatccccttattttttggggaccaacaaatcccgtatattactctttaatgtaaatacacaaactaccttaactttcgcaagctgagataaacagcgctatacgacaatttttatgtaaaagagtacgtcataacggcaggtcaggagggaaagcgaggccgcttagcggaaggggagcataagaaacagccagtaagaataacttaccggctgtttttacggttcggcgcctgggccgaattaatcctgcaggtcgccgcagaagcgataaccttcgccgtgaatggtggcgatgatttccggcgtatccggcgtggattcgaaatgcttacgaatacgacgaatggtaacgtcaacagtacggtcatgcggcttcagctcgcggccggtcattttcttcaacagctctgcgcgcgactgaattttgccagggttttcgcagaagtgaagcatcgcgcggaactcgctgcgcggtagtttatactgctcgccgtccgggccgatcagtgaacgactgttgatatccagttcccaaccgttgaacttgtagctttcaacgctacgacgctcttcgctggcggtacccaggttcatggtacgggacagcaggttgcgggcacggatggtcaattcgcgtgggttaaacggtttggtgatgtaatcatccgcgccgatttcgaggccgagaattttgtcgacttcgttatcgcggcccgtcaggaacatcagcgcaacgttagcctgttcacgcagttcacgcgctaacaggagaccgtttttccctggcagattgatatccatgatcaccaggttgatgtcatattcagagaggatctgatgcatttccgcgccatctgtcgcttcgaatacatcatagccttccgcttcgaaaatacttttcaacgtgttgcgtgttaccaactcgtcttcaacgataagaatgtgcggggtctgcatgtttgctacctaaattgccaactaaatcgaaacaggaagtacaaaagtccctgacctgcctgatgcatgtcgcaaattaacatgatcggcgtaacatgactaaagtacgtaattgcgttcttgatgcactttccatcaacgtcaacaacatcattagcttggtcgtgggtactttccctctggacccgacagtgtcaaaaacggctgtcatcctaaccattttaacagcaacataacaggctaagacgtaccggacacctaataaaactacgcttcgttgacatatatcaagttcaattgtagcacgttaacagtttgatgaaatcatcgtagctaaatgctagctttcatcacaaatttgcaatattccaactagttacgtaagccaactaataaatgtgatgaatccaaagaacaggatctattttaaattaaattatcctaaataaacagtaggataacgatgttctgttaacataaacagcaatagtacagatacgcaatagtgtagcgtcttttacgaaatcaaaaatgctttttcagtgatatcagttaaaattttgtaaatttgcgaagcgtaatatgcttacaaacgccagctaatttcctgtaaattagtcaaaaagagtaatgaaatgcgtgtaacaatcgttcttgtcgctcccgccagagcggaaaatatcggcgcagccgcccgggctatgaagaccatgggatttactgacctgcgtattgtcgacagccaggcgcacctggagcccgccacccgttgggtcgcacatggatctggcgatattattgataatattgaggttttccacacccttgctgacgcgctccacgatgtggattttaccgtcgcgacgacagcccgcagccgggcaaaatttcattactacgcttcgcccgctgaactggttcccttattacaggaaaaatcacgctggatgcgtcatgccgcgctggtttttggccgtgaggattccggtctgaccaatgacgagctggcgctggcggatgtattgaccggcgtgccgatggcggcggattacccttcgctcaatctgggacaggcagtcatggtgtattgctatcaattagcaggtttaatgcaacagaccacagaatccgttgatattgctgatgaatcgcagttacaggcgttacgcgcgcgccttttacgcctgctaacgactctggaggcgaccgatgaccacaaattaaccgactggctacaacagcgaatcggcctgctgggacagcgagatacggtaatgttgcaccgtttggtccatgatattgaaaaaaaactaacaaaataacgtgctgtaatttttaaaataataagagattacgtctggttgcaagagatcatgacagggggaattggttgaaaataaatatatcgccagcagcacatgaacaagtttcggaatgtgatcaatttaaaaatttattgacttaggcgggcagatactttaaccaatataggaatacaagacagacaaataaaaatgacagagtacacaacatccatgaaccgcatcagcaccaccaccattaccaccatcaccattaccac

SEQ ID NO: 54 - DNA, 21 bp, Artificial Sequence
  Description of Artificial Sequence: Synthetic forward primer
acggagatactctggctctga

SEQ ID NO: 55 - DNA, 22 bp, Artificial Sequence
  Description of Artificial Sequence: Synthetic forward primer
ccggcagagcaatcaggatatg

SEQ ID NO: 56 - DNA, 22 bp, Artificial Sequence
  Description of Artificial Sequence: Synthetic forward primer
gcgcaccatactcgtttactca

SEQ ID NO: 57 - DNA, 26 bp, Artificial Sequence
  Description of Artificial Sequence: Synthetic forward primer
caaagtggaaattaacccaggattcc

SEQ ID NO: 58 - DNA, 23 bp, Artificial Sequence
  Description of Artificial Sequence: Synthetic forward primer
cgacgcaccatattcaggaaatt

SEQ ID NO: 59 - DNA, 19 bp, Artificial Sequence
  Description of Artificial Sequence: Synthetic forward primer
ccgaggcattgacggtcat

SEQ ID NO: 60 - DNA, 24 bp, Artificial Sequence
  Description of Artificial Sequence: Synthetic forward primer
ccaggagcttaagtatgaccgtta

SEQ ID NO: 61 - DNA, 20 bp, Artificial Sequence
  Description of Artificial Sequence: Synthetic forward primer
cgcgctggtgtatgaacatg

SEQ ID NO: 62 - DNA, 26 bp, Artificial Sequence
  Description of Artificial Sequence: Synthetic forward primer
ctctttttcaatccacgagacggtat

SEQ ID NO: 63 - DNA, 20 bp, Artificial Sequence
  Description of Artificial Sequence: Synthetic forward primer
tccattgcctgtagcgaacc

SEQ ID NO: 64 - DNA, 25 bp, Artificial Sequence
  Description of Artificial Sequence: Synthetic forward primer
tgtggatgttgctgctttattacct

SEQ ID NO: 65 - DNA, 15 bp, Artificial Sequence
  Description of Artificial Sequence: Synthetic forward primer
ccgttcacgcggcaa

SEQ ID NO: 66 - DNA, 21 bp, Artificial Sequence
  Description of Artificial Sequence: Synthetic forward primer
gctgtcagttgctggtatgct

SEQ ID NO: 67 - DNA, 21 bp, Artificial Sequence
  Description of Artificial Sequence: Synthetic forward primer
cgctggacgccatgtagttta

SEQ ID NO: 68 - DNA, 13 bp, Artificial Sequence
  Description of Artificial Sequence: Synthetic forward primer
agcgcgcgcaagc

SEQ ID NO: 69 - DNA, 24 bp, Artificial Sequence
  Description of Artificial Sequence: Synthetic forward primer
tcgcggatgatctcttcagtaaag

SEQ ID NO: 70 - DNA, 24 bp, Artificial Sequence
  Description of Artificial Sequence: Synthetic forward primer
acgttcggcaagtttctccattaa

SEQ ID NO: 71 - DNA, 23 bp, Artificial Sequence
  Description of Artificial Sequence: Synthetic forward primer
gacatccgcaccgttaaagattc

SEQ ID NO: 72 - DNA, 21 bp, Artificial Sequence
  Description of Artificial Sequence: Synthetic forward primer
cctggtccagcgacatattcg

SEQ ID NO: 73 - DNA, 27 bp, Artificial Sequence
  Description of Artificial Sequence: Synthetic forward primer
gttacgtattaatagttttctcgatgt

SEQ ID NO: 74 - DNA, 17 bp, Artificial Sequence
  Description of Artificial Sequence: Synthetic forward primer
ttcttccagcgcctgca

SEQ ID NO: 75 - DNA, 15 bp, Artificial Sequence
  Description of Artificial Sequence: Synthetic forward primer
tgccgcgccggtatc

SEQ ID NO: 76 - DNA, 19 bp, Artificial Sequence
  Description of Artificial Sequence: Synthetic forward primer
ccgtcataccggaggtgtt

SEQ ID NO: 77 - DNA, 17 bp, Artificial Sequence
  Description of Artificial Sequence: Synthetic forward primer
ccgctgacgcagaccat

SEQ ID NO: 78 - DNA, 24 bp, Artificial Sequence
  Description of Artificial Sequence: Synthetic forward primer
acgatgttcaacgcgaagtagtag

SEQ ID NO: 79 - DNA, 25 bp, Artificial Sequence
  Description of Artificial Sequence: Synthetic forward primer
agtggatgttgacatactcattgct

SEQ ID NO: 80 - DNA, 33 bp, Artificial Sequence
  Description of Artificial Sequence: Synthetic forward primer
actcctttctataaccttttgtcaactttaaca

SEQ ID NO: 81 - DNA, 23 bp, Artificial Sequence
  Description of Artificial Sequence: Synthetic forward primer
cctaaccaccataatccctgcat

SEQ ID NO: 82 - DNA, 19 bp, Artificial Sequence
  Description of Artificial Sequence: Synthetic forward primer
ggtgacaccaaaccagcga

SEQ ID NO: 83 - DNA, 23 bp, Artificial Sequence
  Description of Artificial Sequence: Synthetic forward primer
tgatgaaaggcgaaatcgacgat

SEQ ID NO: 84 - DNA, 22 bp, Artificial Sequence
  Description of Artificial Sequence: Synthetic forward primer
gacttcaattcccatgcgttga

SEQ ID NO: 85 - DNA, 25 bp, Artificial Sequence
  Description of Artificial Sequence: Synthetic forward primer
cgcatctctcatggtatcaattgac

SEQ ID NO: 86 - DNA, 20 bp, Artificial Sequence
  Description of Artificial Sequence: Synthetic forward primer
cgctaccttggtacggcttt

SEQ ID NO: 87 - DNA, 19 bp, Artificial Sequence
  Description of Artificial Sequence: Synthetic forward primer
tgtactgccccagcatcag

SEQ ID NO: 88 - DNA, 22 bp, Artificial Sequence
  Description of Artificial Sequence: Synthetic forward primer
gcaacattgcaggtctggatac

SEQ ID NO: 89 - DNA, 20 bp, Artificial Sequence
  Description of Artificial Sequence: Synthetic forward primer
ctccaggcggtgatctcaaa

SEQ ID NO: 90 - DNA, 19 bp, Artificial Sequence
  Description of Artificial Sequence: Synthetic forward primer
ccgccatccccataaaggt

SEQ ID NO: 91 - DNA, 20 bp, Artificial Sequence
  Description of Artificial Sequence: Synthetic forward primer
gccgtcaatcgcaatttcct

SEQ ID NO: 92 - DNA, 21 bp, Artificial Sequence
  Description of Artificial Sequence: Synthetic forward primer
acgaaacgccgtaaccgtaaa

SEQ ID NO: 93 - DNA, 15 bp, Artificial Sequence
  Description of Artificial Sequence: Synthetic forward primer
ccgcgccgacaatcg

SEQ ID NO: 94 - DNA, 15 bp, Artificial Sequence
  Description of Artificial Sequence: Synthetic forward primer
cccggcgatgcggtt

SEQ ID NO: 95 - DNA, 22 bp, Artificial Sequence
  Description of Artificial Sequence: Synthetic forward primer
gttaacgatctggtgctgcaaa

SEQ ID NO: 96 - DNA, 14 bp, Artificial Sequence
  Description of Artificial Sequence: Synthetic forward primer
gccaagcgcggaca

SEQ ID NO: 97 - DNA, 23 bp, Artificial Sequence
  Description of Artificial Sequence: Synthetic forward primer
ccgacgatacccataacacgtta

SEQ ID NO: 98 - DNA, 20 bp, Artificial Sequence
  Description of Artificial Sequence: Synthetic forward primer
ccagtccgggttcttttcgt

SEQ ID NO: 99 - DNA, 18 bp, Artificial Sequence
  Description of Artificial Sequence: Synthetic forward primer
cgcgcggataaccgtaca

SEQ ID NO: 100 - DNA, 23 bp, Artificial Sequence
  Description of Artificial Sequence: Synthetic forward primer
gtgagctgtacagtagcgaatcc

SEQ ID NO: 101 - DNA, 23 bp, Artificial Sequence
  Description of Artificial Sequence: Synthetic forward primer
tcttcagtcagacgggaacgata

SEQ ID NO: 102 - DNA, 18 bp, Artificial Sequence
  Description of Artificial Sequence: Synthetic forward primer
gtcccgtgacaccaagct

SEQ ID NO: 103 - DNA, 23 bp, Artificial Sequence
  Description of Artificial Sequence: Synthetic forward primer
gcgatgatggataacctgcaaac

SEQ ID NO: 104 - DNA, 25 bp, Artificial Sequence
  Description of Artificial Sequence: Synthetic forward primer
tgtagaacgtggtgatgtgatttcc

SEQ ID NO: 105 - DNA, 24 bp, Artificial Sequence
  Description of Artificial Sequence: Synthetic forward primer
gggctggctttttcaatcaaatcg

SEQ ID NO: 106 - DNA, 18 bp, Artificial Sequence
  Description of Artificial Sequence: Synthetic reverse primer
cattgtcggcccgattcg

SEQ ID NO: 107 - DNA, 20 bp, Artificial Sequence
  Description of Artificial Sequence: Synthetic reverse primer
gcgctggcaaaacagattgg

SEQ ID NO: 108 - DNA, 22 bp, Artificial Sequence
  Description of Artificial Sequence: Synthetic reverse primer
gttgcgccattcaatgtccaat

SEQ ID NO: 109 - DNA, 18 bp, Artificial Sequence
  Description of Artificial Sequence: Synthetic reverse primer
gccgcaacacgggtatga

SEQ ID NO: 110 - DNA, 21 bp, Artificial Sequence
  Description of Artificial Sequence: Synthetic reverse primer
caagatcctgacgggaaagct

SEQ ID NO: 111 - DNA, 20 bp, Artificial Sequence
  Description of Artificial Sequence: Synthetic reverse primer
caggatacggcgtcagtgtt

SEQ ID NO: 112 - DNA, 17 bp, Artificial Sequence
  Description of Artificial Sequence: Synthetic reverse primer
tgcgccatgaagcgtac

SEQ ID NO: 113 - DNA, 20 bp, Artificial Sequence
  Description of Artificial Sequence: Synthetic reverse primer
tccttcagcagttcgccaat

SEQ ID NO: 114 - DNA, 17 bp, Artificial Sequence
  Description of Artificial Sequence: Synthetic reverse primer
cggcaaccaggcaagtg

SEQ ID NO: 115 - DNA, 19 bp, Artificial Sequence
  Description of Artificial Sequence: Synthetic reverse primer
gccgtctgtttggcgaaaa

SEQ ID NO: 116 - DNA, 24 bp, Artificial Sequence
  Description of Artificial Sequence: Synthetic reverse primer
gaaaagaagagcggaacaaaacca

SEQ ID NO: 117 - DNA, 19 bp, Artificial Sequence
  Description of Artificial Sequence: Synthetic reverse primer
ccgacaattcgccgatctg

SEQ ID NO: 118 - DNA, 20 bp, Artificial Sequence
  Description of Artificial Sequence: Synthetic reverse primer
ctggcgcttttacgcagaaa

SEQ ID NO: 119 - DNA, 22 bp, Artificial Sequence
  Description of Artificial Sequence: Synthetic reverse primer
gggagttgcagcggattatttt

SEQ ID NO: 120 - DNA, 15 bp, Artificial Sequence
  Description of Artificial Sequence: Synthetic reverse primer
tgcgcgctccaccat

SEQ ID NO: 121 - DNA, 21 bp, Artificial Sequence
  Description of Artificial Sequence: Synthetic reverse primer
gatgtggtgcgtaacgtgaag

SEQ ID NO: 122 - DNA, 23 bp, Artificial Sequence
  Description of Artificial Sequence: Synthetic reverse primer
attctcaaggttaatgcgcctga

SEQ ID NO: 123 - DNA, 25 bp, Artificial Sequence
  Description of Artificial Sequence: Synthetic reverse primer
ggtcggatattccttgacccatatt

SEQ ID NO: 124 - DNA, 22 bp, Artificial Sequence
  Description of Artificial Sequence: Synthetic reverse primer
agcaagacgctgactttgatct

SEQ ID NO: 125 - DNA, 26 bp, Artificial Sequence
  Description of Artificial Sequence: Synthetic reverse primer
tgtcattaggttagctgcaacaattc

SEQ ID NO: 126 - DNA, 19 bp, Artificial Sequence
  Description of Artificial Sequence: Synthetic reverse primer
cgcgatctcagccagctta

SEQ ID NO: 127 - DNA, 14 bp, Artificial Sequence
  Description of Artificial Sequence: Synthetic reverse primer
cgtaagcgggccga

SEQ ID NO: 128 - DNA, 22 bp, Artificial Sequence
  Description of Artificial Sequence: Synthetic reverse primer
gtgattgccggtctttgctttt

SEQ ID NO: 129 - DNA, 22 bp, Artificial Sequence
  Description of Artificial Sequence: Synthetic reverse primer
actgggaacgctttgttaacga

SEQ ID NO: 130 - DNA, 23 bp, Artificial Sequence
  Description of Artificial Sequence: Synthetic reverse primer
aaacgcgtactgagctatatgct

SEQ ID NO: 131 - DNA, 32 bp, Artificial Sequence
  Description of Artificial Sequence: Synthetic reverse primer
atcaattagctgtttttatcattttctacagt

SEQ ID NO: 132 - DNA, 25 bp, Artificial Sequence
  Description of Artificial Sequence: Synthetic reverse primer
caacggacacgattcaacaacataa

SEQ ID NO: 133 - DNA, 19 bp, Artificial Sequence
  Description of Artificial Sequence: Synthetic reverse primer
cgatttatgccgcctgtcg

SEQ ID NO: 134 - DNA, 15 bp, Artificial Sequence
  Description of Artificial Sequence: Synthetic reverse primer
gcggcgttgactggc

SEQ ID NO: 135 - DNA, 19 bp, Artificial Sequence
  Description of Artificial Sequence: Synthetic reverse primer
gacatcacctggcccagat

SEQ ID NO: 136 - DNA, 17 bp, Artificial Sequence
  Description of Artificial Sequence: Synthetic reverse primer
gcgtaccgccgccaata

SEQ ID NO: 137 - DNA, 17 bp, Artificial Sequence
  Description of Artificial Sequence: Synthetic reverse primer
ggtaaaaccggcggacg

SEQ ID NO: 138 - DNA, 19 bp, Artificial Sequence
  Description of Artificial Sequence: Synthetic reverse primer
gcgtgaagcaacggtaagg

SEQ ID NO: 139 - DNA, 19 bp, Artificial Sequence
  Description of Artificial Sequence: Synthetic reverse primer
ttcaaacggccctcgtgaa

SEQ ID NO: 140 - DNA, 15 bp, Artificial Sequence
  Description of Artificial Sequence: Synthetic reverse primer
gcgccgatgatcagg

SEQ ID NO: 141 - DNA, 22 bp, Artificial Sequence
  Description of Artificial Sequence: Synthetic reverse primer
acgttaccactcgctgattgtc

SEQ ID NO: 142 - DNA, 17 bp, Artificial Sequence
  Description of Artificial Sequence: Synthetic reverse primer
cgcacggcgctaatcac

SEQ ID NO: 143 - DNA, 25 bp, Artificial Sequence
  Description of Artificial Sequence: Synthetic reverse primer
gcgaagtcatggccaatattgaaat

SEQ ID NO: 144 - DNA, 18 bp, Artificial Sequence
  Description of Artificial Sequence: Synthetic reverse primer
ctggcgcgaaagcaaagt

SEQ ID NO: 145 - DNA, 18 bp, Artificial Sequence
  Description of Artificial Sequence: Synthetic reverse primer
tgccggaacgctcgatac

SEQ ID NO: 146 - DNA, 22 bp, Artificial Sequence
  Description of Artificial Sequence: Synthetic reverse primer
tgagtttatccaccaccaccac

SEQ ID NO: 147 - DNA, 22 bp, Artificial Sequence
  Description of Artificial Sequence: Synthetic reverse primer
ggaatcatcgcctgccagttta

SEQ ID NO: 148 - DNA, 23 bp, Artificial Sequence
  Description of Artificial Sequence: Synthetic reverse primer
gccgagttacgtggtgattatgg

SEQ ID NO: 149 - DNA, 17 bp, Artificial Sequence
  Description of Artificial Sequence: Synthetic reverse primer
ggttcggccaccagtcg

SEQ ID NO: 150 - DNA, 18 bp, Artificial Sequence
  Description of Artificial Sequence: Synthetic reverse primer
gaaaccacgccggaactg

SEQ ID NO: 151 - DNA, 17 bp, Artificial Sequence
  Description of Artificial Sequence: Synthetic reverse primer
cgccgctggctaacttc

SEQ ID NO: 152 - DNA, 25 bp, Artificial Sequence
  Description of Artificial Sequence: Synthetic reverse primer
gcactgctctacttttggttctttt

SEQ ID NO: 153 - DNA, 30 bp, Artificial Sequence
  Description of Artificial Sequence: Synthetic reverse primer
tcagttaagaaacgtttataccgatccatt

SEQ ID NO: 154 - DNA, 26 bp, Artificial Sequence
  Description of Artificial Sequence: Synthetic reverse primer
gtaaacgataccggattcatccagtt

SEQ ID NO: 155 - DNA, 19 bp, Artificial Sequence
  Description of Artificial Sequence: Synthetic reverse primer
aatctgtgccgcagaacca

SEQ ID NO: 156 - DNA, 22 bp, Artificial Sequence
  Description of Artificial Sequence: Synthetic reverse primer
ccctgcagacggtatacatcct

SEQ ID NO: 157 - DNA, 22 bp, Artificial Sequence
  Description of Artificial Sequence: Synthetic reverse primer
tgagcatgtgatcgtcctgaag

SEQ ID NO: 158 - DNA, 16 bp, Artificial Sequence
  Description of Artificial Sequence: Synthetic probe 1
tgtggaagccgacgcc

SEQ ID NO: 159 - DNA, 17 bp, Artificial Sequence
  Description of Artificial Sequence: Synthetic probe 1
cccaaaacgatgccagc

SEQ ID NO: 160 - DNA, 17 bp, Artificial Sequence
  Description of Artificial Sequence: Synthetic probe 1
ccagaaccagttgttca

SEQ ID NO: 161 - DNA, 24 bp, Artificial Sequence
  Description of Artificial Sequence: Synthetic probe 1
cttttaacacatgctggtggagca

SEQ ID NO: 162 - DNA, 16 bp, Artificial Sequence
  Description of Artificial Sequence: Synthetic probe 1
cggtacatcgaacatc

SEQ ID NO: 163 - DNA, 14 bp, Artificial Sequence
  Description of Artificial Sequence: Synthetic probe 1
tctggccatcctgg

SEQ ID NO: 164 - DNA, 18 bp, Artificial Sequence
  Description of Artificial Sequence: Synthetic probe 1
ttgtcgttacagatatgg

SEQ ID NO: 165 - DNA, 16 bp, Artificial Sequence
  Description of Artificial Sequence: Synthetic probe 1
tgaatcgcggattgtg

SEQ ID NO: 166 - DNA, 14 bp, Artificial Sequence
  Description of Artificial Sequence: Synthetic probe 1
aagtccgggccgcg

SEQ ID NO: 167 - DNA, 14 bp, Artificial Sequence
  Description of Artificial Sequence: Synthetic probe 1
tggcgccgctgatt

SEQ ID NO: 168 - DNA, 17 bp, Artificial Sequence
  Description of Artificial Sequence: Synthetic probe 1
tcgtgccgaaggtacaa

SEQ ID NO: 169 - DNA, 14 bp, Artificial Sequence
  Description of Artificial Sequence: Synthetic probe 1
cggtcggccccggt

SEQ ID NO: 170 - DNA, 16 bp, Artificial Sequence
  Description of Artificial Sequence: Synthetic probe 1
cgcgattacagaagat

SEQ ID NO: 171 - DNA, 16 bp, Artificial Sequence
  Description of Artificial Sequence: Synthetic probe 1
tttctcgggcctcgcg

SEQ ID NO: 172 - DNA, 23 bp, Artificial Sequence
  Description of Artificial Sequence: Synthetic probe 1
aggatgccgatattattatcagt

SEQ ID NO: 173 - DNA, 16 bp, Artificial Sequence
  Description of Artificial Sequence: Synthetic probe 1
ccgatcagaatatccg

SEQ ID NO: 174 - DNA, 17 bp, Artificial Sequence
  Description of Artificial Sequence: Synthetic probe 1
aagcgatttcatcttct

SEQ ID NO: 175 - DNA, 17 bp, Artificial Sequence
  Description of Artificial Sequence: Synthetic probe 1
cgaatgatgcgacatat

SEQ ID NO: 176 - DNA, 17 bp, Artificial Sequence
  Description of Artificial Sequence: Synthetic probe 1
ttgctcaaccaaccgtg

SEQ ID NO: 177 - DNA, 15 bp, Artificial Sequence
  Description of Artificial Sequence: Synthetic probe 1
atagcgcgcttaaat

SEQ ID NO: 178 - DNA, 15 bp, Artificial Sequence
  Description of Artificial Sequence: Synthetic probe 1
cggtacggaaagcga

SEQ ID NO: 179 - DNA, 15 bp, Artificial Sequence
  Description of Artificial Sequence: Synthetic probe 1
cagcgcaacggcgaa

SEQ ID NO: 180 - DNA, 18 bp, Artificial Sequence
  Description of Artificial Sequence: Synthetic probe 1
cctcaatgtttggcaacc

SEQ ID NO: 181 - DNA, 17 bp, Artificial Sequence
  Description of Artificial Sequence: Synthetic probe 1
atcgaactgacccagcc

SEQ ID NO: 182 - DNA, 23 bp, Artificial Sequence
  Description of Artificial Sequence: Synthetic probe 1
attaatttcgatataaacaaacg

SEQ ID NO: 183 - DNA, 16 bp, Artificial Sequence
  Description of Artificial Sequence: Synthetic probe 1
aagagcagaggaactg

SEQ ID NO: 184 - DNA, 23 bp, Artificial Sequence
  Description of Artificial Sequence: Synthetic probe 1
cacttaatgttaatggtgatgaa

SEQ ID NO: 185 - DNA, 18 bp, Artificial Sequence
  Description of Artificial Sequence: Synthetic probe 1
tcagttaggtccggccgt

SEQ ID NO: 186 - DNA, 23 bp, Artificial Sequence
  Description of Artificial Sequence: Synthetic probe 1
cctttgaacgttttactcccaat

SEQ ID NO: 187 - DNA, 16 bp, Artificial Sequence
  Description of Artificial Sequence: Synthetic probe 1
aatcgccgctacatat

SEQ ID NO: 188 - DNA, 15 bp, Artificial Sequence
  Description of Artificial Sequence: Synthetic probe 1
aggtgccacatgacg

SEQ ID NO: 189 - DNA, 17 bp, Artificial Sequence
  Description of Artificial Sequence: Synthetic probe 1
aaccgaacagagtgttg

SEQ ID NO: 190 - DNA, 15 bp, Artificial Sequence
  Description of Artificial Sequence: Synthetic probe 1
ccgtcggcgctgtaa

SEQ ID NO: 191 - DNA, 16 bp, Artificial Sequence
  Description of Artificial Sequence: Synthetic probe 1
cagcgtttgcgacacg

SEQ ID NO: 192 - DNA, 20 bp, Artificial Sequence
  Description of Artificial Sequence: Synthetic probe 1
cacaaacgcttttttaaacg

SEQ ID NO: 193 - DNA, 17 bp, Artificial Sequence
  Description of Artificial Sequence: Synthetic probe 1
ccacgttgcctgagtgt

SEQ ID NO: 194 - DNA, 14 bp, Artificial Sequence
  Description of Artificial Sequence: Synthetic probe 1
atcggcaccaagcg

SEQ ID NO: 195 - DNA, 18 bp, Artificial Sequence
  Description of Artificial Sequence: Synthetic probe 1
aagcaacctgtccgtttt

SEQ ID NO: 196 - DNA, 14 bp, Artificial Sequence
  Description of Artificial Sequence: Synthetic probe 1
tgctcgctaaaaag

SEQ ID NO: 197 - DNA, 16 bp, Artificial Sequence
  Description of Artificial Sequence: Synthetic probe 1
ccatcacgatcaccgc

SEQ ID NO: 198 - DNA, 17 bp, Artificial Sequence
  Description of Artificial Sequence: Synthetic probe 1
caccagaatgcgtttca

SEQ ID NO: 199 - DNA, 17 bp, Artificial Sequence
  Description of Artificial Sequence: Synthetic probe 1
cgggcagtaaatgatat

SEQ ID NO: 200 - DNA, 15 bp, Artificial Sequence
  Description of Artificial Sequence: Synthetic probe 1
aaaagtgcaaaatct

SEQ ID NO: 201 - DNA, 15 bp, Artificial Sequence
  Description of Artificial Sequence: Synthetic probe 1
cagggacagccagcc

SEQ ID NO: 202 - DNA, 17 bp, Artificial Sequence
  Description of Artificial Sequence: Synthetic probe 1
ctgttgcagaatctcaa

SEQ ID NO: 203 - DNA, 16 bp, Artificial Sequence
  Description of Artificial Sequence: Synthetic probe 1
ccagtaccagcgtgcg

SEQ ID NO: 204 - DNA, 18 bp, Artificial Sequence
  Description of Artificial Sequence: Synthetic probe 1
ccgtttgtcccactgtat

SEQ ID NO: 205 - DNA, 14 bp, Artificial Sequence
  Description of Artificial Sequence: Synthetic probe 1
caggccgagttgct

SEQ ID NO: 206 - DNA, 16 bp, Artificial Sequence
  Description of Artificial Sequence: Synthetic probe 1
acgttcgggatgtcag

SEQ ID NO: 207 - DNA, 17 bp, Artificial Sequence
  Description of Artificial Sequence: Synthetic probe 1
ctgttgaaggagacctg

SEQ ID NO: 208 - DNA, 17 bp, Artificial Sequence
  Description of Artificial Sequence: Synthetic probe 1
cagcatgaacgccacgc

SEQ ID NO: 209 - DNA, 18 bp, Artificial Sequence
  Description of Artificial Sequence: Synthetic probe 1
tggcaagaaggccgcgac

SEQ ID NO: 210 - DNA, 17 bp, Artificial Sequence
  Description of Artificial Sequence: Synthetic probe 2
atgtggaaaccgacgcc

SEQ ID NO: 211 - DNA, 16 bp, Artificial Sequence
  Description of Artificial Sequence: Synthetic probe 2
ccaaaacgacgccagc

SEQ ID NO: 212 - DNA, 17 bp, Artificial Sequence
  Description of Artificial Sequence: Synthetic probe 2
ccagaaccaattgttca

SEQ ID NO: 213 - DNA, 24 bp, Artificial Sequence
  Description of Artificial Sequence: Synthetic probe 2
cttttaacacatgctgatggagca

SEQ ID NO: 214 - DNA, 16 bp, Artificial Sequence
  Description of Artificial Sequence: Synthetic probe 2
cggtacatcaaacatc

SEQ ID NO: 215 - DNA, 14 bp, Artificial Sequence
  Description of Artificial Sequence: Synthetic probe 2
tctggccgtcctgg

SEQ ID NO: 216 - DNA, 18 bp, Artificial Sequence
  Description of Artificial Sequence: Synthetic probe 2
ttgtcgttaccgatatgg

SEQ ID NO: 217 - DNA, 17 bp, Artificial Sequence
  Description of Artificial Sequence: Synthetic probe 2
atgaatcgcgtattgtg

SEQ ID NO: 218 - DNA, 14 bp, Artificial Sequence
  Description of Artificial Sequence: Synthetic probe 2
aagtccgcgccgcg

SEQ ID NO: 219 - DNA, 14 bp, Artificial Sequence
  Description of Artificial Sequence: Synthetic probe 2
tggcgccactgatt

SEQ ID NO: 220 - DNA, 16 bp, Artificial Sequence
  Description of Artificial Sequence: Synthetic probe 2
cgtgccgaaagtacaa

SEQ ID NO: 221 - DNA, 14 bp, Artificial Sequence
  Description of Artificial Sequence: Synthetic probe 2
cggtcggtcccggt

SEQ ID NO: 222 - DNA, 16 bp, Artificial Sequence
  Description of Artificial Sequence: Synthetic probe 2
cgcgattacggaagat

SEQ ID NO: 223 - DNA, 16 bp, Artificial Sequence
  Description of Artificial Sequence: Synthetic probe 2
tttctcgggcgtcgcg

SEQ ID NO: 224 - DNA, 20 bp, Artificial Sequence
  Description of Artificial Sequence: Synthetic probe 2
atgccgatattatcatcagt

SEQ ID NO: 225 - DNA, 15 bp, Artificial Sequence
  Description of Artificial Sequence: Synthetic probe 2
cgatcaggatatccg

SEQ ID NO: 226 - DNA, 18 bp, Artificial Sequence
  Description of Artificial Sequence: Synthetic probe 2
aaagcgatttcctcttct

SEQ ID NO: 227 - DNA, 17 bp, Artificial Sequence
  Description of Artificial Sequence: Synthetic probe 2
cgaatgatgcaacatat

SEQ ID NO: 228 - DNA, 17 bp, Artificial Sequence
  Description of Artificial Sequence: Synthetic probe 2
ttgctcaaccagccgtg

SEQ ID NO: 229 - DNA, 17 bp, Artificial Sequence
  Description of Artificial Sequence: Synthetic probe 2
agatagcgctcttaaat

SEQ ID NO: 230 - DNA, 15 bp, Artificial Sequence
  Description of Artificial Sequence: Synthetic probe 2
cggtacgaaaagcga

SEQ ID NO: 231 - DNA, 15 bp, Artificial Sequence
  Description of Artificial Sequence: Synthetic probe 2
cagcgcaacagcgaa

SEQ ID NO: 232 - DNA, 17 bp, Artificial Sequence
  Description of Artificial Sequence: Synthetic probe 2
ctcaatgttcggcaacc

SEQ ID NO: 233 - DNA, 15 bp, Artificial Sequence
  Description of Artificial Sequence: Synthetic probe 2
cgaactggcccagcc

SEQ ID NO: 234 - DNA, 20 bp, Artificial Sequence
  Description of Artificial Sequence: Synthetic probe 2
aatttcgatatagacaaacg

SEQ ID NO: 235 - DNA, 15 bp, Artificial Sequence
  Description of Artificial Sequence: Synthetic probe 2
agagcagagaaactg

SEQ ID NO: 236 - DNA, 23 bp, Artificial Sequence
  Description of Artificial Sequence: Synthetic probe 2
cacttaatgttaatgatgatgaa

SEQ ID NO: 237 - DNA, 16 bp, Artificial Sequence
  Description of Artificial Sequence: Synthetic probe 2
agttaggcccggccgt

SEQ ID NO: 238 - DNA, 21 bp, Artificial Sequence
  Description of Artificial Sequence: Synthetic probe 2
tttgaacgttttacccccaat

SEQ ID NO: 239 - DNA, 13 bp, Artificial Sequence
  Description of Artificial Sequence: Synthetic probe 2
cgccgctgcatat

SEQ ID NO: 240 - DNA, 15 bp, Artificial Sequence
  Description of Artificial Sequence: Synthetic probe 2
aggtgccgcatgacg

SEQ ID NO: 241 - DNA, 16 bp, Artificial Sequence
  Description of Artificial Sequence: Synthetic probe 2
accgaacaaagtgttg

SEQ ID NO: 242 - DNA, 15 bp, Artificial Sequence
  Description of Artificial Sequence: Synthetic probe 2
ccgtcggcactgtaa

SEQ ID NO: 243 - DNA, 16 bp, Artificial Sequence
  Description of Artificial Sequence: Synthetic probe 2
cagcgtttgtgacacg

SEQ ID NO: 244 - DNA, 20 bp, Artificial Sequence
  Description of Artificial Sequence: Synthetic probe 2
cacaaacgtttttttaaacg

SEQ ID NO: 245 - DNA, 15 bp, Artificial Sequence
  Description of Artificial Sequence: Synthetic probe 2
acgttgccagagtgt

SEQ ID NO: 246 - DNA, 12 bp, Artificial Sequence
  Description of Artificial Sequence: Synthetic probe 2
cggcgccaagcg

SEQ ID NO: 247 - DNA, 15 bp, Artificial Sequence
  Description of Artificial Sequence: Synthetic probe 2
caacctgcccgtttt

SEQ ID NO: 248 - DNA, 15 bp, Artificial Sequence
  Description of Artificial Sequence: Synthetic probe 2
ctgctcgttaaaaag

SEQ ID NO: 249 - DNA, 16 bp, Artificial Sequence
  Description of Artificial Sequence: Synthetic probe 2
ccatcacgatgaccgc

SEQ ID NO: 250 - DNA, 17 bp, Artificial Sequence
  Description of Artificial Sequence: Synthetic probe 2
caccagaatccgtttca

SEQ ID NO: 251 - DNA, 17 bp, Artificial Sequence
  Description of Artificial Sequence: Synthetic probe 2
cgggcagtaaataatat

SEQ ID NO: 252 - DNA, 16 bp, Artificial Sequence
  Description of Artificial Sequence: Synthetic probe 2
caaaagtacaaaatct

SEQ ID NO: 253 - DNA, 15 bp, Artificial Sequence
  Description of Artificial Sequence: Synthetic probe 2
cagggactgccagcc

SEQ ID NO: 254 - DNA, 16 bp, Artificial Sequence
  Description of Artificial Sequence: Synthetic probe 2
tgttgcaggatctcaa

SEQ ID NO: 255 - DNA, 16 bp, Artificial Sequence
  Description of Artificial Sequence: Synthetic probe 2
ccagtaccagtgtgcg

SEQ ID NO: 256 - DNA, 17 bp, Artificial Sequence
  Description of Artificial Sequence: Synthetic probe 2
cgtttgtcccgctgtat

SEQ ID NO: 257 - DNA, 13 bp, Artificial Sequence
  Description of Artificial Sequence: Synthetic probe 2
aggccgaattgct

SEQ ID NO: 258 - DNA, 15 bp, Artificial Sequence
  Description of Artificial Sequence: Synthetic probe 2
cgttcgggatatcag

SEQ ID NO: 259 - DNA, 16 bp, Artificial Sequence
  Description of Artificial Sequence: Synthetic probe 2
tgttgaaggaaacctg

SEQ ID NO: 260 - DNA, 17 bp, Artificial Sequence
  Description of Artificial Sequence: Synthetic probe 2
cagcatgaacaccacgc

SEQ ID NO: 261 - DNA, 18 bp, Artificial Sequence
  Description of Artificial Sequence: Synthetic probe 2
tggcaagaagaccgcgac
